(19) United States
(12) Patent Application Publication
(10) Pub. No.: US 2019/0359964 A1
(43) Pub. Date: Nov. 28, 2019

(54) MODIFIED PICORNAVIRUS 3C PROTEASES AND METHODS THEREOF

(71) Applicant: The Government of the United States of America, as represented by the Secretary of Homeland Security, Washington, DC (US)

(72) Inventors: Michael Puckette, Waterford, CT (US); John Neilan, Wethersfield, CT (US)

(73) Assignee: The Government of the United States of America, as represented by the Secretary of Homeland Securit, Washington, DC (US)

(21) Appl. No.: 15/986,214

(22) Filed: May 22, 2018

(51) Int. Cl. C12N 9/64; C12N 15/52; A61K 39/135

(52) U.S. Cl. CPC C12N 9/6472; C12N 15/52; C12N 2770/32034; C12Y 304/22028; A61K 39/135

(57) ABSTRACT

The disclosure is directed to an isolated polynucleotide encoding a modified picornavirus 3C protease, wherein the modified picornavirus 3C protease includes an altered secondary structure and one or more amino acid substitution(s) located at one or more amino acid position(s) corresponding to positions 16-25, 99-100 and 115-130 of a wild-type Fool-and-Mouth Disease Virus (FMDV) 3C protease, wherein the isolated polynucleotide encoding the modified picornavirus 3C protease, when transformed into and co-expressed in a host cell, enhances transgene expression of a P1 precursor polypeptide in comparison to an amount of P1 precursor polypeptide transgene expression exhibited in a host cell transformed and co-expressed with a control picornavirus 3C protease, wherein the one or more corresponding amino acid position(s) is/are identified by an alignment of the modified picornavirus 3C protease with the one or more of the wild type FMDV 3C protease(s). Methods for processing a picornavirus P1 precursor polypeptide into picornavirus viral proteins and/or virus-like particles using the isolated polynucleotides are also provided.

### SEQUENCE LISTING

[0001] The instant application contains a Sequence Listing, which has been submitted via EFS-Web and is hereby incorporated by reference in its entirety. The ASCII copy, created on May 20, 2018, is named DHS-0162_ST.25.txt, and is 1,892 kilobytes in size.

### FIELD

[0002] (21 The present disclosure relates to modified picornaviruses 3C proteases. The modified picornaviruses proteases exhibit reduced cytotoxicity when expressed in host cells.

### BACKGROUND

[0003] Picornaviruses, which include genera such as Aphthovirus (e.g., Foot-and-Mouth Disease Virus (FMDI)), Enterovirus (e.g., polio and rhinoviruses) and Hepatovirus (Hepatitis A virus (HAV)) have a major impact on the health of humans and animals. While some infections may be mild, many picornaviral strains cause serious disease and substantial economic burden.

[0004] Structurally, picornaviruses are non-enveloped RNA viruses characterized by a capsid surrounding a core of single-stranded genomic RNA. The genomic RNA contains one open reading frame, which is translated into a large polyprotein that is subsequently cleaved into structural and nonstructural proteins by viral-encoded proteases. Those structural proteins that are used to assemble the capsid are ultimately derived from an intermediate cleavage product, P1 (also known as P1-2A).

[0005] Subunit vaccines against various picornaviral strains using only the assembled capsid (Virus-Like Particles or VLPs) are presently under development. These multiprotein structures, which may be recombinantly expressed in a host cell, mimic the organization and conformation of authentic native viruses, but lack the viral genome. Consequently, such vaccines, which contain only a portion of virus, are less likely to result in accidental outbreaks during manufacturing than, e.g., the more commonly used inactivated whole live viral vaccines.

[0006] Despite the potential safety of picornaviral subunit vaccines comprising VLPs, such structures may be difficult to obtain from host cells. For example, cytosolic expression of a picornavirus 3C protease (or 3C^{pro}), or the fusion protein of 3C^{pro} with the 3D polymerase (or 3CD), is typically required to process the P1 polyprotein into the individual structural proteins that assemble into the capsids. However, the use of 3C^{pro} or 3CD in a host cell can cause proteolysis of a variety of host proteins, including those associated with cell survival. Accordingly, expression of wild-type 3C^{pro} or 3CD in host cells can restrict vaccine production platform options and reduce antigen yields.

[0007] Recent reports describe FADV 3C protease mutants that mitigate detrimental effects on host cells, such as E. coli, while maintaining the ability to process recombinant FMDV P1 polyprotein. However, no other picornavirus 3C or 3CD protease mutants with these properties have been described. Furthermore, new FMDV 3C protease mutants are desirable since these may provide additional benefits in E. coli, mammalian host cells or other expression systems. Consequently, there is a desire for additional picornavirus 3C or 3CD protease mutants that facilitate the expression of picornavirus 3C protease in host cells.

### SUMMARY OF THE DISCLOSURE

[0008] In a first aspect, the present disclosure is directed to an isolated polynucleotide encoding a modified picornavirus 3C protease, wherein the modified picornavirus 3C protease includes one or more amino acid substitution(s) located at one or more amino acid position(s) corresponding to positions 16-25, 99-100 and 115-130 of a wild-type Fool-and-Mouth Disease Virus (FMDV) 3C protease. Typically, the wild-type FMDV 3C protease described herein is selected from among SEQ ID NOS: 2, 4, 6, 8, 10, 12, 14, 16, 18 and 20.

[0009] In some embodiments, the isolated polynucleotide encoding the modified picornavirus 3C protease, when transformed into and co-expressed in a host cell, enhances transgene expression of a P1 precursor polypeptide in comparison to an amount of P1 precursor polypeptide transgene expression exhibited in a host cell transformed and co-expressed with a control picornavirus 3C protease as herein defined.

[0010] In some embodiments, the modified picornavirus 3C protease encoded by the present isolated polynucleotide, such as a modified FMDV 3C protease as described herein, exhibits proteolytic activity on a picornavirus P1 precursor polypeptide.

[0011] In some embodiments, the modified picornavirus 3C protease encoded by the present isolated polynucleotide, such as a modified FMDV 3C protease as described herein, exhibits an increase or decrease in an amount of eIF4A1 proteolytically-cleaved in a host cell in comparison to an amount of eIF4A1 proteolytically cleaved in a host cell expressing a control picornavirus 3C protease. Typically, the modified picornavirus 3C protease exhibits a decrease in an amount of proteolytically-cleaved eIF4A1 in a host cell compared to an amount of proteolytically-cleaved eIF4A1 in a host cell expressing a control picornavirus 3C protease.

[0012] In some embodiments, the modified picornavirus 3C protease encoded by the present isolated polynucleotide, such as a modified FMDV 3C protease as described herein, exhibits an increase or decrease in an amount of histone H3, nuclear transcription factor kappa B essential modulator (NEMO), or Src-associated substrate in mitosis of 68 kDa (SAM68) in comparison to an amount of histone H3, NEMO, or SAM68 in a host cell expressing a control picornavirus 3C protease. Typically, the modified picornavirus 3C protease exhibits a decrease in an amount of histone H3, NEMO, or SAM68 in a host cell compared to an amount of histone H3, NEMO, or SAM68 in a host cell expressing a control picornavirus 3C protease.

[0013] In some embodiments, the isolated polynucleotide encoding the modified picornavirus 3C protease, expresses an altered protein secondary structure. For example, an altered alpha-helix, an altered beta sheet, an altered loop, etc. Typically, the altered secondary structure is selected from among an altered A₁-B₁ β sheet, an altered loop between an F₁ β strand and an A₂ β strand, and an altered A₂-B₂ β sheet, wherein the one or more amino acid substitution(s) is/are located at one or more positions selected from among at least one of: position(s) corresponding to one or more of amino acids 16-25 in the A₁-B₁ β sheet of a wild type Foot-and-Mouth Disease Virus (FMADV) 3C protease, position(s) corresponding to one or more of amino acids 99 and 100 in the loop between an F₁ β strand and an A₂ β strand of a wild type FMDV 3C protease, and position(s) corresponding to one or more of amino acids 115-130 in the A₂-B₂ β sheet of a wild type FMDV 3C protease.

[0014] In some embodiments, the one or more corresponding amino acid positions is/are identified by an alignment of a primary amino acid sequence of the modified picornavirus 3C protease with a primary amino acid sequence of the one or more of the wild type FMDV 3C proteases. Typically, the alignment is performed using Clone Manager 9, Professional Edition, Version 9.4, 1 Jan. 2015, using Blossum 62 with default parameters.

[0015] In some embodiments, the one or more corresponding amino acid positions is/are identified by comparing a protein conformation of the modified picornavirus 3C protease with a protein conformation of the one or more of the wild type FMDV 3C proteases as described herein. Typically, however, an alignment of the primary amino acid sequences is used to determine a corresponding amino acid position.

[0016] In some embodiments, the modified picornavirus 3C proteases of the present disclosure exclude modified FMDV 3C proteases. In other embodiments, the modified picornavirus 3C proteases exclude a modified FMDV 3C protease with one or more amino acid substitutions, wherein the one or more amino acid substitutions are selected from the group consisting of an amino acid substitution at position 125, an amino acid substitution at position 126, an amino acid substitution at position 127, an amino acid substitution at position 128, an amino acid substitution at position 129, an amino acid substitution at position 130 and combinations thereof.

[0017] In some embodiments, the modified picornavirus 3C protease may be obtained or derived from any species, subtype and/or serotype from any of the picornavirus genera including Aphthovirus, Aquamavirus, Avihepatovirus, Cardiovirus, Cosavirus, Dicipivirus, Enterovirus, Erbovirus, Hepatovirus, Kobuvirus Megrivirus, Parechovirus, Piscevirus, Salivirus, Sapelovirus, Senecavirus, Teschovirus and Tremovirus. Typically, the genera include Aphthovirus, Enterovirus and Hepatovirus.

[0018] Typical species within the Aphthovirus genus include Bovine rhinitis A virus, Bovine rhinitis B virus, Equine rhinitis A virus and Foot-and-mouth disease virus (FMDV). Typical Enterovirus species include Enterovirus A, Enterovirus B, Enterovirus C, Rhinovirus A and Rhinovirus B. Typical species within the Hepatovirus include Hepatitis A virus.

[0019] Typical desirable serotypes within FMDV include O, A, C, Southern African Territories (SAT) 1, SAT2, SAT 3 and Asia 1.

[0020] Typical desirable serotypes within Enterovirus A include coxsackievirus A10 and enterovirus A71.

[0021] Typical desirable serotypes within Enterovirus B include swine vesicular disease virus, coxsackievirus B1 and coxsackievirus B3, more typically coxsackievirus B1 and coxsackievirus B3.

[0022] Typical desirable serotypes within Enterovirus C include coxsackievirus A1, poliovirus 1, poliovirus 2 and poliovirus 3.

[0023] Typical desirable serotypes within Rhinovirus A include Human rhinovirus A2, Human rhinovirus A20 and Human rhinovirus A89.

[0024] Typical desirable serotypes within Rhinovirus B include Human rhinovirus B14.

[0025] In some embodiments, the modified picornavirus 3C protease is selected from among: a modified Aphthovirus 3C protease, such as a modified FMADV 3C protease, a modified Bovine rhinitis A virus 3C protease, a modified Bovine rhinitis B 3C protease, a modified Equine rhinitis 3C protease; a modified Enterovirus 3C protease, such as a modified Enterovirus A 3C protease, a modified Enterovirus B 3C protease, a modified Enterovirus C 3C protease, a modified Rhinovirus A 3C protease, a modified Rhinovirus B 3C protease; and a modified Hepatovirus 3C protease, such as a modified Hepatitis A virus 3C protease.

[0026] In some embodiments, the one or more amino acid substitutions comprise any amino acid substitution(s). Typically, the amino acid substitution(s) comprises a non-conservative substitution. More typically, the amino acid substitution is proline.

[0027] In some embodiments, the modified picornavirus 3C protease is selected from among a modified FMDI) 3C protease having one or more amino acid substitutions within residues 16-25, 99-100 and 115-130 or corresponding thereto, such as residues 16-25, 99-100 and 115-124, of a wild-type FMDV 3C protease; a modified Bovine rhinitis 3C protease having one or more amino acid substitutions within residues 16-25, 95, 96 and 111-124 of a wild type Bovine rhinitis A 3C protease or corresponding thereto; a modified Bovine rhinitis 3C protease having one or more amino acid substitutions within residues 16-25, 96, 97 and 112-125 of a wild type Bovine rhinitis B 3C protease or corresponding thereto; a modified Equine rhinitis A 3C protease having one or more amino acid substitutions within residues 16-25, 99-100 and 115-130 of a wild type Equine rhinitis A 3C protease or corresponding thereto; a modified Enterovirus A 3C protease having one or more amino acid substitutions within residues 19-24, 86, 87 and 100-113 of a wild type Human coxsackievirus A10 3C protease or corresponding thereto; a modified Enterovirus A 3C protease having one or more amino acid substitutions within residues 19-24, 86, 87 and 100-113 of a wild type Human enterovirus A71 3C protease or corresponding thereto; a modified Enterovirus B 3C protease having one or more amino acid substitutions within residues 18-23, 87, 88 and 102-112 of a wild type Human coxsackievirus B1 or B3 3C protease or corresponding thereto; a modified Enterovirus C 3C protease having one or more amino acid substitutions within residues 19-24, 86, 87 and 100-113 of a wild type Human coxsackievirus A1 3C protease or corresponding thereto, a modified Enterovirus C 3C protease within residues 18-23, 86, 87 and 100-113 of a wild type poliovirus 3C protease or corresponding thereto; a modified Rhinovirus 3C protease having one or more amino acid substitutions within residues 18-23, 86, 87 and 101-114 of a wild type Rhinovirus A or wild type Rhinovirus B or corresponding thereto; and a Hepatovirus 3C protease having one or more amino acid substitutions within residues 15-20, 99, 100 and 124-131 of a wild type Human hepatitis A 3C protease or corresponding thereto.

[0028] In some embodiments, the modified picornavirus 3C protease encoded by the isolated polynucleotide of the present disclosure may be a modified Aphihovirus 3C protease selected from among one or more of a modified FMDV 3C protease having one or more amino acid substitution(s) at one or more position(s) selected from among I22, L23, 199, L99, T100, D123, V124, G125, R126 and 1128, such as selected from among I22 and L23, such as selected from among I99, L99 and T100, such as selected from among D123, V124, G125 and 1128 of a wild type FMADV 3C protease; a modified Bovine rhinitis A virus 3C protease comprising one or more amino acid substitution(s) at one or more position(s) selected from among V22, C23, T96, L123 and F124, such as selected from among V22 and C23, or such as T96, or such as selected from among L123 and F124 of a wild type Bovine rhinitis A virus 3C protease; a modified Bovine rhinitis B 3C protease comprising one or more amino acid substitution(s) at one or more position(s) selected from among V22, R23, T97, V121 and L124, such as selected from among V22, R23, or such as T97, or such as selected from among V121 and L124 of a wild type Bovine rhinitis B 3C protease; and a modified Equine rhinitis A 3C protease comprising one or more amino acid substitution(s) at one or more position(s) selected from among Y22, C23, T100, A125 and T127, such as selected from among T22 and C23, or such as T100, or such as selected from among A125 and T127 of a wild type Equine rhinitis A 3C protease.

[0029] In some embodiments, the modified picornavirus 3C protease encoded by the isolated polynucleotide of the present disclosure is a modified Enterovirus 3C protease selected from among one or more of a modified Enterovirus A 3C protease, such as one or more of: a modified Human coxsackievirus A10 virus comprising one or more amino acid substitution(s) at one or more position(s) selected from among Q19, T20, T87, L102, I104, N105, M109 and M112, such as selected from among Q19 and T20, or such as T87, or such as selected from among L102, I104, N105, M109 and M112 of wild type Human coxsackievirus A10 virus 3C protease and a modified Human enterovirus A71 3C protease comprising one or more amino acid substitution(s) at one or more position(s) selected from among Q19, T20, T87, I104, N105, T106 and M109, such as selected from among Q19 and Q20, or such as T87, or such as selected from among I104, N105, T106 and M109 of a wild type Human enterovirus A71 3C protease; a modified Enterovirus B 3C protease, such as a modified Human coxsackievirus B1 3C protease comprising one or more amino acid substitution(s) at one or more position(s) selected from among K19, T20, R87, L102, I104, N105, T106, F109, M112 and I114, such as selected from among K19 and T20, or such as R87, or such as selected from among L102, I104, N105, T106, F109, M112 and I114 of a wild type Human coxsackievirus B1 and a modified Human coxsackievirus B3 3C protease comprising one or more amino acid substitution(s) at one or more position(s) selected from among K19, T20, R87, L102, I104, N105, T106, F109, M112 and I114, such as selected from among K19 and T20, or such as R87, or such as selected from among L102, I104, N105, T106, F109, M112 and I114 of a wild type Human coxsackievirus B3 3C protease: a modified Enterovirus C 3C protease selected from among one or more of a modified coxsackievirus A1 3C protease comprising one or more amino acid substitution(s) at one or more position(s) selected from among T19, T20, R87, L102, V104, N105, T106, F109 and M112, such as selected from among T19 and T20, or such as R87, or such as selected from among L102, V104, N105, T106, F109 and M112 of a wild type coxsackievirus A1 3C protease, and a modified Human poliovirus 3C protease comprising one or more amino acid substitution(s) at one or more position(s) selected from among T19, T20, R87, L102, I103, and V104, such as selected from among T19 and T20, or such as R87, or such as selected from among L102, I103, and V104 of a wild type Human poliovirus 3C protease; a modified Enterovirus 3C protease selected from among one or more of a modified Rhinovirus A 3C protease comprising one or more amino acid substitution(s) at one or more position(s) selected from among T19, T20, 186, R87, L102, L104, Q108, T112 and I114, such as selected from among T19 and T20, or such as selected from among 186 and R87, or such as selected from among L102, L104, Q108, T112 and I114 of a wild type RhinovirusA 3C protease and a modified Rhinovirus B 3C protease having one or more amino acid substitution(s) at one or more position(s) selected from among T19, T20, 186, R87, I112 and E114, such as selected from among T19 and T20, or such as selected from among I86 and I87, or such as selected from among I112 and E114 of a wild type Rhinovirus B 3C protease and a modified Hepatovirus, such as a modified Hepatitis A virus 3C protease having one or more amino acid substitutions at one or more position(s) selected from among G17, G18, G19, E20, T100, L119, T121, M128 and I130, such as selected from among G19 and E20, or such as T100, or such as selected from among T100, L119, T121, M128 and I130 of a wild type Hepatitis A virus 3C protease.

[0030] Typically, the wild-type FMDV 3C protease described herein is selected from among at least one of SEQ ID NOS: 2, 4, 6, 8, 10, 12, 14, 16, 18 and 20. Typically, the wild type Bovine rhinitis 3C protease described herein is selected from among SEQ ID NOS: 422 and 434. Typically, the wild type Equine rhinitis 3C protease described herein is SEQ ID NO: 444. Typically, the wild type Human coxsackievirus A10 3C protease described herein is SEQ ID NO: 478. Typically, the wild type Human coxsackievirus B1 3C protease described herein is SEQ ID NO: 494. Typically, the wild type Human coxsackievirus B3 3C protease described herein is SEQ ID NO: 510. Typically, the wild type Human coxsackievirus A1 3C protease described herein is SEQ ID NO: 462. Typically, the wild type Human enterovirus A71 3C protease described herein is SEQ ID NO: 536. Typically, the wild type Human hepatitis 3C protease described herein is SEQ ID NO: 538. Typically, the wild type Human poliovirus 3C protease described herein is selected from among SEQ ID NOS: 552, 566, and 580. Typically, the wild type Rhinovirus A 3C protease described herein is selected from among SEQ ID NOS: 604, 618 and 620. Typically, the wild type Rhinovirus B 3C protease described herein is SEQ ID NO: 594.

[0031] In some embodiments, the modified picornavirus 3C protease is a modified FMDV 3C protease encoded by the isolated polynucleotide of the present disclosure having at least 90%, such as at least 91%, such as at least 92%, such as at least 93%, such as at least 94%, such as at least 95%, such as at least 96%, such as at least 97%, such as at least 98%, such as at least 99% to one or more of a wild-type FMDV 3C protease selected from among SEQ ID NOS: 2, 4, 6, 8, 10, 12, 14, 16, 18 and 20.

[0032] In some embodiments, the modified picornavirus 3C protease is a modified Bovine rhinitis 3C protease encoded by the isolated polynucleotide of the present disclosure having at least 90%, such as at least 91%, such as at least 92%, such as at least 93%, such as at least 94%, such as at least 95%, such as at least 96%, such as at least 97%, such as at least 98%, such as at least 99% identity to one or more of a wild type Bovine rhinitis 3C protease selected from among SEQ ID NOS: 422 and 434.

[0033] In some embodiments, the modified picornavirus 3C protease is a modified Equine rhinitis 3C protease encoded by the isolated polynucleotide of the present disclosure having at least 90%, such as at least 91%, such as at least 92%, such as at least 93%, such as at least 94%, such as at least 95° 0%, such as at least 96%, such as at least 97%, such as at least 98%, such as at least 99% identity to the wild type Equine rhinitis A 3C protease of SEQ ID NO: 444.

[0034] In some embodiments, the modified picornavirus 3C protease is a modified Enterovirus A 3C protease encoded by the isolated polynucleotide of the present disclosure having at least 90%, such as at least 91%, such as at least 92%, such as at least 93%, such as at least 94%, such as at least 95%, such as at least 96%, such as at least 97%, such as at least 98%, such as at least 99% identity to the wild type Human coxsackievirus A10 3C protease of SEQ ID NO: 478.

[0035] In some embodiments, the modified picornavirus 3C protease is a modified Enterovirus A 3C protease encoded by the isolated polynucleotide of the present disclosure having at least 90%, such as at least 91%, such as at least 92%, such as at least 93%, such as at least 94%, such as at least 95%, such as at least 96%, such as at least 97%, such as at least 98%, such as at least 99% identity to the wild type Human enterovirus A71 3C protease is SEQ ID NO: 536.

[0036] In some embodiments, the modified picornavirus 3C protease is a modified Enterovirus B 3 C protease encoded by the isolated polynucleotide of the present disclosure having at least 90%, such as at least 91%, such as at least 92%, such as at least 93%, such as at least 94%, such as at least 95%, such as at least 96%, such as at least 97%, such as at least 98%, such as at least 99% identity to the wild type Human coxsackievirus B1 3C protease of SEQ ID NO: 494.

[0037] In some embodiments, the modified picornavirus 3C protease is a modified Enterovirus B 3 C protease encoded by the isolated polynucleotide of the present disclosure having at least 90%, such as at least 91%, such as at least 92%, such as at least 93%, such as at least 94%, such as at least 95%, such as at least 96%, such as at least 97%, such as at least 98%, such as at least 99% identity to the wild type Human coxsackievirus B3 3C protease of SEQ ID NO: 510.

[0038] In some embodiments, the modified picornavirus 3C protease is a modified Enterovirus C 3C protease encoded by the isolated polynucleotide of the present disclosure having at least 90%, such as at least 91%, such as at least 92%, such as at least 93%, such as at least 94%, such as at least 95%, such as at least 96%, such as at least 97%, such as at least 98%, such as at least 99% identity to the wild type Human coxsackievirus A1 3C protease of SEQ ID NO: 462.

[0039] In some embodiments, the modified picornavirus 3C protease is a modified Enterovirus C 3C protease encoded by the isolated polynucleotide of the present disclosure having at least 90%, such as at least 91%, such as at least 92%, such as at least 93%, such as at least 94%, such as at least 95%, such as at least 96%, such as at least 97%, such as at least 98%, such as at least 99% identity to one or more of a wild type Human poliovirus 3C protease selected from among SEQ ID NOS:552, 566 and 580.

[0040] In some embodiments, the modified picornavirus 3C protease is a modified Enterovirus 3C protease encoded by the isolated polynucleotide of the present disclosure having at least 90%, such as at least 91%, such as at least 92%, such as at least 93%, such as at least 94%, such as at least 95%, such as at least 96%, such as at least 97%, such as at least 98%, such as at least 99% identity to one or more of a wild type Rhinovirus A 3C protease selected from among SEQ ID NOS: 604, 618 and 620.

[0041] In some embodiments, the modified picornavirus 3C protease is a modified Enterovirus 3C protease encoded by the isolated polynucleotide of the present disclosure having at least 90%, such as at least 91%, such as at least 92%, such as at least 93%, such as at least 94%, such as at least 95%, such as at least 96%, such as at least 97%, such as at least 98%, such as at least 99% identity to the wild type Rhinovirus B 3C protease of SEQ ID NO:594.

[0042] In some embodiments, the modified picornavirus 3C protease is a modified Hepatitis A virus 3C protease encoded by the isolated polynucleotide of the present disclosure having at least 90%, such as at least 91%, such as at least 92%, such as at least 93%, such as at least 94%, such as at least 95%, such as at least 96%, such as at least 97%, such as at least 98%, such as at least 99% identity to the wild type Human hepatitis 3C protease of SEQ ID NO:538.

[0043] In some embodiments, the modified FMDV 3C protease encoded by the isolated polynucleotide of the present disclosure is selected from among SEQ ID NOS: 22, 24, 26, 28, 30, 32, 34, 36, 38, 40, 42, 44, 46, 48, 50, 52, 54, 56, 58, 60, 62, 64, 66, 68, 70, 72, 74, 76, 78, 80, 82, 84, 86, 88, 90, 92, 94, 96, 98, 100, 102, 104, 106, 108, 110, 112, 114, 116, 178, 180, 138, 140, 142, 144, 146, 148, 150, 152, 154, 156, 182, 184, 186, 188, 190, 192, 194, 196, 198, 200, 202, 204, 206, 208, 210, 212, 214, 216, 218, 220, 222, 224, 226, 228, 230, 232, 234, 236, 238, 240, 242, 244, 246, 248, 250, 252, 254, 256, 258, 260, 262, 264, 266, 268, 270, 272, 274, 276, 278, 280, 302, 304, 306, 308, 310, 312, 314, 316, 318, 320, 322, 324, 326, 328, 330, 332, 334, 336, 338, 340, 342, 344, 346, 348, 350, 352, 354, 356, 358 and 360.

[0044] In some embodiments, the modified Bovine rhinovirus 3C protease encoded by the isolated polynucleotide of the present disclosure is selected from among SEQ ID NOS: 412, 414, 416, 418, 420, 424, 426, 428, 430 and 432.

[0045] In some embodiments, the modified Equine rhinovirus 3C protease encoded by the isolated polynucleotide of the present disclosure is selected from among SEQ ID NOS: 436, 438, 440, 442 and 446.

[0046] In some embodiments, the modified Enterovirus A 3C protease encoded by the isolated polynucleotide of the present disclosure is selected from among SEQ ID NO: 464, 466, 468, 470, 472, 474, 476, 512, 514, 516, 518, 520, 522 and 524.

[0047] In some embodiments, the modified Enterovirus A 3C protease encoded by the isolated polynucleotide of the present disclosure is selected from among SEQ ID NO: 480, 482, 484, 486, 488, 490, 492, 496, 498, 500, 502, 504, 506 and 508.

[0048] In some embodiments, the modified Enterovirus C 3C protease encoded by the isolated polynucleotide of the present disclosure is selected from among SEQ ID NO: 448, 450, 452, 454, 456, 458, 460, 540, 542, 544, 546, 548, 550, 554, 556, 558, 560, 562, 564, 568, 570, 572, 574, 576 and 578.

[0049] In some embodiments, the modified Rhinovirus A 3C protease encoded by the isolated polynucleotide of the present disclosure is selected from among SEQ ID NOS: 596, 598, 600, 602, 604, 606, 608, 610, 612, 614, 616, 618, 620, 622, 624, 626, 628, 630, 632 and 634.

[0050] In some embodiments, the modified Rhinovirus B 3C protease encoded by the isolated polynucleotide of the present disclosure is selected from among SEQ ID NO: 582, 584, 586, 588, 590 and 592.

[0051] In some embodiments, the modified Hepatitis A virus 3C protease encoded by the isolated polynucleotide of the present disclosure is selected from among SEQ ID NO: 528, 530, 532, 534, 536 652 and 654.

[0052] In some embodiments, the isolated polynucleotide encoding the modified picornavirus 3C protease as described herein further comprises at least one polynucleotide sequence encoding a picornavirus P1 precursor polypeptide. Typically, the picornavirus P1 precursor polypeptide is obtained from any of the picornavirus genera, species and/or strains as described herein.

[0053] In some embodiments, the isolated polynucleotide encoding the modified picornavirus 3C protease as described herein further comprises at least one polynucleotide sequence encoding a 3D peptide.

[0054] In some embodiments, the isolated polynucleotide encoding the modified picornavirus 3C protease as described herein encodes a fusion polypeptide, wherein the fusion polypeptide comprises at least polynucleotide sequence encoding a 3D peptide. Typically, the fusion polypeptide is a 3CD polypeptide.

[0055] In some embodiments, the picornavirus P1 precursor polypeptide is an FMDV P1 precursor polypeptide. In some embodiments, the FMDV P1 precursor polypeptide is selected from at least one of SEQ ID NOS: 363, 366, 369, 372, 375, 378, 381, 384 and 387. In some embodiments, the picornavirus P1 precursor polypeptide, such as an FMDV P1 precursor polypeptide, has a polynucleotide sequence at least 90% identical, such as at least 91% identical, such as at least 92% identical, such as at least 93% identical, such as at least 94% identical, such as at least 95% identical, such as at least 96% identical, such as at least 97% identical, such as at least 98% identical, such as at least 99% identical, such as 100% identical to SEQ ID NOS: 362, 365, 368, 371, 374, 377, 380, 383 and 386.

[0056] In another aspect, the present disclosure is directed to a modified picornavirus 3C protease encoded by the isolated polynucleotides of the first aspect of the present disclosure. In this subsequent aspect of the disclosure, the options and embodiments of the first aspect apply mutatis mutandis.

[0057] In another aspect, the present disclosure is directed to a vector comprising the isolated polynucleotide described above in the first aspect. In this subsequent aspect of the disclosure, the options and embodiments of the first aspect apply mutatis mutandis. Additional options and embodiments of the vector of the disclosure follow.

[0058] In some embodiments, the present vector comprising the isolated polynucleotide of the present disclosure is a minicircle vector as described herein, a plasmid vector, a baculovirus vector, an alphavirus vector, a lentivirus vector, a replication deficient adenovirus vector or a vaccinia virus vector.

[0059] In some embodiments, the vector of the present disclosure further comprises a polynucleotide encoding at least one protein or polypeptide of interest in addition to a polynucleotide encoding the modified picornavirus 3C protease as described herein. For example, the vector may further include at least one promoter or other transcription regulatory element, at least one prokaryotic or eukaryotic translation initiation sequence or other translation regulatory element, at least one translational interrupter sequence, and/or at least one reporter gene operatively linked to the polynucleotide sequence encoding the modified picornavirus 3C protease or to another protein of interest. Other proteins of interest include, for example, a picornavirus protein, such as at least one polynucleotide sequence encoding for VP0, VP3, VP1 and, optionally, 3D, 2A, Δ1D2A, GLuc and/or SGLuc.

[0060] In another aspect, the present disclosure is directed to a host cell comprising the vector described above. In this subsequent aspect of the disclosure, the options and embodiments of the first aspect and the aspect directed to the vector apply mutatis mutandis. Additional options and embodiments of the host cells of the present disclosure follow.

[0061] In some embodiments, the vectors described herein are expressed in the present host cells. The present host cells may be eukaryotic or prokaryotic host cells. Suitable eukaryotic cells that may be used with the vectors, polynucleotide constructs, compositions and/or methods as described herein include fungal cells such as Saccharomyces cerevisiae, Pichia pastoris; plant cells such as Arabidopsis thaliana, Chlamydomonas reinhardtii, Glycine max, Nicotiana benthamiana, Nicotiana tabacum, Oryza saliva and Zea mays; insect cells such as Spodoptera frugiperda, Drosophila melanogaster, Sf9, Sf21; vertebrate cells, such as mammalian cells, e.g., HEK-293 (human kidney embryo) cell, Chinese Hamster Ovary (CHO) cells, Baby Hamster Kidney (BHK) cells, LF-BK (porcine) cells and/or an LF-BK αV/β6 cell.

[0062] In some embodiments, the vector described herein is expressed in a host cell, such as an animal cell, such as vertebrate cell, such as a mammalian cell that is susceptible to picornavirus infection, e.g., an FMDV infection.

[0063] Suitable prokaryotic cells include gram-positive prokaryotic cells such as Bacillus, Lactococcus, Streptomyces, Rhodococcus, Corynebacterium and/or Mycobacterium and gram-negative prokaryotic cells such as Escherichia and Pseudomonas.

[0064] In another aspect, the present disclosure is directed to a composition including a polynucleotide or vector encoding the modified picornavirus 3C protease as described herein and a pharmaceutically acceptable excipient, adjuvant, buffer or solution suitable for proteolysis by the modified picornavirus 3C protease. In this subsequent aspect of the disclosure, the options and embodiments of the first aspect and the aspect directed to the vector apply mutatis mutandis.

[0065] In yet another aspect, the present disclosure is also directed to a method for processing a picornavirus P1 precursor polypeptide into picornavirus viral proteins and/or VLPs, which method comprises: culturing a host cell comprising the present isolated polynucleotides and/or a vector containing the present isolated polynucleotides in a suitable medium; and recovering at least one viral protein selected from among VP0, VP1, VP2, VP3 and VP4 and/or VLPs. In this subsequent aspect of the disclosure, the options and embodiments of the first aspect apply mutatis mutandis. The options and embodiments of the vector aspect and host cell aspect also apply mutatis mutandis. Additional options and embodiments of the present method follow.

[0066] In some embodiments, at least VP0, VP1 and VP3 are recovered. In some embodiments, the VLPs that are recovered are FMDV VLPs.

[0067] In some embodiments, the method for processing a picornavirus P1 precursor polypeptide into picornavirus viral proteins and/or VLPs, further comprises monitoring picornavirus 3C protease activity, such as a modified FMDV 3C protease or picornavirus P1 precursor polypeptide expression, such as FMDV P1 precursor polypeptide expression, by measuring an amount of secreted luciferase.

[0068] In some embodiments of the instant methods, at least 90%, such as at least 95%, of the picornavirus P1 precursor polypeptide, such as an FMDV P1 precursor polypeptide, which is expressed by a host cell of the present disclosure, is cleaved by a modified picornavirus 3C protease, such as a modified FMDV picornavirus 3C protease as described herein.

[0069] In some embodiments of the instant methods, less than 10%, such as less than 5%, such as less than 2% of one or more host cell proteins are cleaved by a picornavirus 3C protease, such as a modified FMDV 3C protease as described herein, in comparison to an otherwise identical host cell expressing a control picornavirus 3C protease.

[0070] In some embodiments of the instant methods, more picornavirus P1 precursor polypeptide as described herein, such as an FMDV P1 precursor polypeptide, is expressed or recovered from a host cell than is an amount from an otherwise identical host cell expressing a control picornavirus 3C protease.

[0071] In some embodiments of the instant methods, more VP0, VP1, VP2, VP3 VP4 and/or VLPs is (are) expressed and/or recovered from a host cell than is an amount from a control picornavirus 3C protease.

[0072] In some embodiments of the instant methods, a vector as described herein in a host cell as also described herein, encodes a modified picornavirus 3C protease, such as a modified FMDV 3C protease, a 2A or other translation interrupter sequence, and a picornavirus P1 precursor polypeptide, such as an FMDV P1 precursor polypeptide without an N-terminal methionine residue, and optionally at least one of GLuc, SGLuc or other luciferase, which can be secreted.

[0073] In some embodiments of the instant methods, a vector in a host cell as described herein encodes a modified picornavirus 3C protease, such as a modified FMDV 3C protease as described herein, a picornavirus 3D polymerase, a 2A or other translation interrupter sequence, and a picornavirus P1 precursor polypeptide, such as an FMDV P1 precursor polypeptide, within an N terminal methionine residue, and optionally at least one of GLuc, SGLuc or other luciferase, which can be secreted.

[0074] In some embodiments of the instant methods, a host cell of the instant disclosure comprises a vector expressing a fusion protein comprising a modified picornavirus 3C protease, such as modified FMDV 3C protease, as described herein, a picornavirus P1 precursor polypeptide, such as an FMDV P1 precursor polypeptide as described herein and at least one of GLuc, SGLuc or other luciferase, which can be secreted, and optionally at least one of a 3D, 2A, Δ1D2A, or other translation interrupter sequence.

[0075] In some embodiments of the instant methods, a host cell of the present disclosure comprises a vector expressing a fusion protein comprising a modified picornavirus 3C protease, such as modified FMDV 3C protease, as described herein, a picornavirus P1 precursor polypeptide, such as an FMDV P1 precursor polypeptide as described herein, a picornavirus 3D polymerase and at least one of GLuc, SGLuc or other luciferase, which can be secreted and, and optionally, at least one of a 2A, A1D2A, or other translation interrupter sequence.

[0076] The present disclosure is also directed to a method for inducing an immune response against a picornavirus comprising administering a vector or polynucleotide construct as described herein, which encodes a modified picornavirus 3C protease and a P1 precursor polypeptide, as herein described, to a subject in need thereof.

[0077] The present disclosure is also directed to a method for inducing an immune response against a picornavirus comprising administering VP0, VP1, VP2, VP3 and VP4 and/or VLPs as described herein, which is produced in a eukaryotic cell and/or a prokaryotic cell through the introduction of an isolated polynucleotide encoding the modified picornavirus 3C protease and a P1 precursor polypeptide, as described herein, to a subject in need thereof.

[0078] In these subsequent aspects of the disclosure, the options and embodiments of the first aspect apply mutatis mutandis.

### BRIEF DESCRIPTIONS OF THE FIGURES

[0079] FIG. 1 depicts a single open-reading frame (ORF) and associated genetic elements of a picornavirus RNA genome that encodes a viral polyprotein in a single ORF. FIG. 1 also depicts processing the viral polyprotein into intermediate precursor polypeptides and ultimately into individual viral proteins.

[0080] FIG. 2 depicts a diagram of an FMDV 3C protease crystal structure as described in the detailed description.

[0081] FIG. 3 depicts the relative positions of exemplary known secondary structures and a triad of catalytic residues at positions 46, 84 and 163 in the amino acid sequence of the 3C protease of wild-type FMDV strain Asia Lebanon 89 (SEQ ID NO: 6).

[0082] FIG. 4 depicts an alignment of wild type 3C proteases from FMDV, Bovine rhinitis A, Bovine rhinitis B and Equine Rhinitis A as described in the detailed description and Example 3. Selected secondary structures are also identified.

[0083] FIG. 5 depicts an alignment of wild type 3C proteases from FMDV, coxsackievirus A10 and coxsackievirus A1 as described in the detailed description and Example 3. Selected secondary structures are also identified.

[0084] FIG. 6 depicts an alignment of wild type 3C proteases from FMDV and Human enterovirus A71 as described in the detailed description and Example 3. Selected secondary structures are also identified.

[0085] FIG. 7 depicts an alignment of wild type 3C proteases from FMDV, coxsackievirus B3 and coxsackievirus B1 as described in the detailed description and Example 3. Selected secondary structures are also identified.

[0086] FIG. 8 depicts an alignment of wild type 3C proteases from FMDV, poliovirus 1, poliovirus 2 and poliovirus 3 as described in the detailed description and Example 3. Selected secondary structures are also identified.

[0087] FIG. 9 depicts an alignment of wild type 3C proteases from FMDV, Human rhinovirus A2, Human rhinovirus A89 and Human rhinovirus A20 as described in the detailed description and Example 3. Selected secondary structures are also identified.

[0088] FIG. 10 depicts an alignment of wild type 3C proteases from FMDV and Human rhinovirus B14 as described in the detailed description and Example 3. Selected secondary structures are also identified.

[0089] FIG. 11 depicts an alignment of wild type 3C proteases from FMDV and Hepatitis A virus as described in the detailed description and Example 3. Selected secondary structures are also identified.

[0090] FIG. 12 depicts an alignment of a portion of wild type 3C proteases from FMDV, Coxsackievirus A10, coxsackievirus A1, Poliovirus 1, Poliovirus 2, Poliovirus 3, Human rhinovirus A2, Human Rhinovirus A89, Human rhinovirus A20, Human rhinovirus B14, Human enterovirus A71, coxsackievirus B3, coxsackievirus B1, Hepatitis A virus, Bovine rhinitis A, Bovine rhinitis B and Equine Rhinitis A as described in the detailed description and Example 3. Selected secondary structures are also identified.

[0091] FIGS. 13A-13D. FIG. 13A depicts a portion of a crystal structure of an FMDV 3C protease displaying side chains formed by amino acids 123 to 128 as described in Example 2A. FIG. 13B depicts a map of a pJJP expression plasmid encoding an FMDV P1 polypeptide (O1MP1), a 3C protease and a marker (Δ1D2A-GLuc Δ1M) as described in Examples 2A and 2B. FIG. 13C and FIG. 13D depict luciferase readings and a Western blot of cell lysates, respectively, obtained from HEK293T cells transfected with pJJP plasmids encoding for FMADV 3C protease mutants containing proline substitutions at residues 123 to 128, a wild type FMDV 3C protease and an FMDV 3C protease mutant containing alanine in place of cysteine at residue 163 as described in Examples 2A and 2B.

[0092] FIG. 14 depicts transformed E. coli bacteria on carbenicillin (+CARB) or carbenicillin/Isopropyl β-D-1-thiogalactopyranoside (+CARB/+IPTG) agar growth medium for evaluation of the effect of wild type 3C protease expression and the 3C protease mutants, L23P, L43H and T100P, on E. coli colony growth as described in Example 2B.

[0093] FIGS. 15A-15B: FIG. 15A and FIG. 15B depict luciferase readings and a Western blot of cell lysates, respectively, obtained from HEK293T cells transfected with pJJP plasmids encoding for FMDV 3C protease mutants containing proline substitutions at residues 22, 23, 99, 100 and 127, a wild type FMDV 3C protease and an FMDV 3C protease mutant containing alanine in place of cysteine at residue 163 as described in Example 2B.

[0094] FIG. 16 depicts locations of residues T100, V124 and L127 in a wild type FMDV 3C protease and the relative locations of the structures containing these residues.

[0095] FIGS. 17A-17B: FIG. 17A and FIG. 17B depict luciferase readings and a Western blot of cell lysates, respectively, obtained from HEK293T cells transfected with pJJP plasmids encoding for FMDV 3C protease mutants containing triple proline substitutions at residues 22, 100 and 127 and residues 22, 100 and 124, a wild type FMDV 3C protease and an FMDV 3C protease mutant containing alanine in place of cysteine at residue 163 as described in Example 2C.

[0096] FIGS. 18A-18D: FIG. 18A depicts the structure of the B₂-A₂ β sheet in a wild type FMDV 3C protease relative to the loop containing the C163 residue as described in Example 5D. FIG. 18B depicts the protease side chain structures for residues V119, N121, V124, and L127 relative to Y162 as also described in Example 2E. FIG. 18C depicts the structure spanning residues 7 to 28, which includes the N-terminal a helix and Aₗ β strand, relative to the substrate binding pocket. Side chains of residues I22 and L23 are also shown. See Example 2E. FIG. 18D depicts structures connected to or proximal to residues 199 and T100 as also described in Example 2E.

[0097] FIG. 19 depicts those residues with close side chain proximity to the residue adjacent the catalytic cysteine in crystal structures of 3C proteases from six picornaviruses as described in Example 2E.

[0098] FIG. 20 depicts those residues in five picornavirus having structural homology to residues I22 and L23 of FMDV 3C protease as described in Example 2E.

[0099] FIG. 21 depicts those residues in five picornavirus having structural homology to residue T100 of FMDV 3C protease as described in Example 2E.

[0100] FIG. 22 depicts luciferase readings from CHO-K1 (dark gray) and BHK-21 (light gray) cells transfected with pJJP plasmids containing FMDV 3Cpro proline mutations at residues 122, L23, T100, V124, G125, R126, L127, and double mutant combinations 122/L127 and V124/L127 as described in Example 2D.

[0101] FIGS. 23A-23C: FIG. 23A depicts western blots of cell lysates from CHO-K1 and BHK-21 cells transfected with pJJP plasmids containing FMDV 3Cpro proline mutations at residues 122, L23, T100, V124, G125, R126, L127, and double mutant combinations 122/L127 and V124/L127 as described in Example 2D. FIG. 23B depicts an electron microscopy image taken of VLP arrays in CHO-K1 cells transfected with a pJJP plasmid containing the L127P mutation and an O1 Manisa P1 polypeptide as described in Example 2D. FIG. 23C depicts an electron microscopy image taken of VLP arrays in BHK-21 cells transfected with a pJJP plasmid containing the V124P mutation and an 01 Manisa P1 polypeptide as described in Example 2D.

### DETAILED DESCRIPTION

### Definitions

[0102] As used herein, the term “isolated” refers to a polynucleotide, polypeptide or other component that is removed from at least one component with which it is naturally associated. For example, an isolated polynucleotide, polypeptide or other component may be present outside the cell in which it is typically found in nature, whether purified or not. Additionally or alternatively, the isolated component is found in a context other than that in which it is naturally found, e.g., separated from nucleotide sequences with which it typically is in proximity in nature, or adjacent (or contiguous with) nucleotide sequences with which it typically is not in proximity. Optionally, an isolated component, e.g., polynucleotide or polypeptide, may be subjected to one or more enrichment or purification procedures, e.g., cell lysis, extraction, centrifugation, precipitation, or the like.

[0103] A “nucleotide” refers to an organic molecule that serves as a monomer, or a subunit of nucleic acids like DNA and RNA. Nucleotides are building blocks of nucleic acids and are composed of a nitrogenous base (e.g., A (adenine), G (guanine), C (cytosine), T/U (thymine/uracil), a five-carbon sugar (ribose or deoxyribose), and at least one phosphate group. Thus, a nucleoside plus a phosphate group yields a nucleotide. Nucleotides in a polynucleotide sequence are commonly indicated based on their nitrogenous bases.

[0104] A “nucleotide sequence”, “polynucleotide sequence” or a “nucleic acid sequence” is a succession of letters that indicate the order of nucleotides or nucleic acids within a DNA (using GACT) or an RNA molecule (using GACU). A DNA molecule, RNA molecule or other polynucleotide sequence may be single or double stranded and may be genomic, recombinant, synthetic, a transcript, a PCR product an amplification product, an mRNA or a cDNA. A “nucleotide sequence”, “polynucleotide sequence” or a “nucleic acid sequence” may optionally comprise modified bases or a modified backbone. These terms are also meant to encompass a sequence in either a sense or an antisense orientation and the complement thereof.

[0105] A “recombinant polynucleotide” is a polynucleotide that is not in its native state, e.g., the polynucleotide comprises a nucleotide sequence not found in nature. For example, the sequence at issue can be cloned into a vector, or otherwise recombined with one or more additional nucleic acids.

[0106] As used herein, the term “picornavirus” refers to a non-enveloped virus representing a family of small, cytoplasmic, plus-strand RNA (˜7.0-8.5 kb) viruses with an icosahedral capsid. Genera within this family include Aphthovirus, Aquamavirus, Avihepatovirus, Cardiovirus, Cosavirus, Dicipivirus, Enterovirus, Erbovirus, Hepatovirus, Kobuvirus Megrivirus, Parechovirus. Piscevirus, Salivirus, Sapelovirus, Senecavirus, Teschovirus and Tremovirus. The viral genome of a picornavirus generally contains one open reading frame that encodes a single polyprotein comprising a structural protein region, P1, and non-structural protein regions, P2 and P3. See FIG. 1. The release of mature and functional proteins from the polyprotein is primarily mediated by viral proteinases including 3C protease.

[0107] As used herein, the term “Aphthovirus” refers to a genus in the picornavirus family, which includes species such as Bovine rhinitis A virus, Bovine rhinitis B virus, Equine rhinitis A virus and FMDV.

[0108] As used herein, the term “Bovine rhinitis” refers to all Bovine rhinitis species including Bovine rhinitis A virus (BRAV) and Bovine rhinitis B virus (BRBV). This term is also meant to include Bovine rhinitis A virus serotypes including bovine rhinitis A virus 1 and bovine rhinitis A virus 2, which are also known as bovine rhinovirus 1 & 3, respectively.

[0109] As used herein, the term “Equine rhinitis” refers to any Equine rhinitis species including Equine rhinitis A virus (ERA V), also known as equine rhinovirus 1.

[0110] As used herein, the term “Enterovirus A” also known as “Human enterovirus A” refers to a species of the Enterovirus genus. The term “Enterovirus A” is meant to encompass serotypes of this species including coxsackievirus (CV) serotypes such as CV-A2, CV-A3, CV-A4, CV-A5, CV-A6, CV-A7, CV-A8, CV-A10, CV-A12, CV-A14 & CV-A16 and enterovirus (EV) serotypes such as EV-A71, EV-A76, EV-A89, EV-A90, EV-A91, EV-A92, EV-A114, and EV-A119. Simian Virus serotypes such as SV19, SV43, SV46 and Baboon serotypes, such as BA13 are also included in this species.

[0111] As used herein, the term “Enterovirus B” also known as “Human enterovirus B” refers to a species of the Enterovirus genus. The term “Enterovirus B” is meant to encompass serotypes of this species including coxsackievirus (CV) serotypes such as CVB1, CV-B2, CV-B3, CV-B4, CV-B5, CV-B6 and CV-A9 and enterovirus (EV) serotypes such as EV-B69, EV-B73, EV-B74, EV-B75, EV-B77, EV-B78, EV-B79, EV-B80, EV-B81, EV-B82, EV-B83, EV-B84, EV-B85, EV-B86, EV-B87, EV-B88, EV-B93, EV-B97, EV-B98, EV-B100, EV-B101, EV-B106, EV-B107, EV-B110 and SA5. Echovirus (E) serotypes such as E-1, E-2, E-3, E-4, E-5, E-6, E-7, E-9, E-11, E-12, E-13, E-14, E-15, E-16, E-17, E-18, E-19, E-20, E-21, E-24, E-25, E-26, E-27, E-29, E-30, E-31, E-32, & E-33 are also included in this species.

[0112] As used herein, the term “Enterovirus C” also known as “Human enterovirus C” refers to a species of the Enterovirus genus. The term “Enterovirus C” is meant to encompass serotypes of this species including coxsackievirus (CV) serotypes such as CV-A1, CV-A11, CV-A13, CV-A17, CV-A19, CV-A20, CV-A21, CV-A22 and CV-A24 and enterovirus (EV) serotypes such as EV-C95, EV-C96, EV-C99, EV-C102, EV-C104, EV-C105, EV-C109, EV-C116, EV-C117 and EV-C118. Poliovirus (PV) serotypes including PV1, PV2 and PV3 are also included in this species.

[0113] As used herein, the term “human coxsackievirus” is meant to encompass the coxsackievirus serotypes that infect humans. Such serotypes include Enterovirus A serotypes e.g., CV-A10, Enterovirus B serotypes e.g., CV-B1 and CV-B3; and Enterovirus C serotypes e.g. CV-A 1.

[0114] As used herein, the term “human poliovirus” is meant to encompass the poliovirus serotypes that infect humans. Such serotypes include Enterovirus C serotypes e.g., poliovirus-(PV-) 1, PV-2 and PV-3.

[0115] As used herein, the term “Rhinovirus A” also known as “Human rhinovirus A” refers to a species of the Enterovirus genus. The term “Rhinovirus A” encompasses human rhinovirus (HRV) serotypes such as HRV-A1, HRV-A2, HRV-A7, HRV-A8, HRV-A9, HRV-A10, HRV-A11, HRV-A12, HRV-A13, HRV-A15, HRV-A16, HRV-A18, HRV-A19, HRV-A20, HRV-A21, HRV-A22, HRV-A23, HRV-A24, HRV-A25, HRV-A28. HRV-A29, HRV-A30, HRV-A31, HRV-A32, HRV-A33, HRV-A34, HRV-A36, HRV-A38, HRV-A39, HRV-A40, HRV-A41, HRV-A43. HRV-A44, HRV-A45, HRV-A46, HRV-A47, HRV-A49, HRV-A50, HRV-A51, HRV-A53, HRV-A54, HRV-A55, HRV-A56, HRV-A57, HRV-A58, HRV-A59, HRV-A60, HRV-A61, HRV-A62, HRV-A63, HRV-A64, HRV-A65, HRV-A66, HRV-A67, HRV-A68, HRV-A71, HRV-A73, HRV-A74, HRV-A75, HRV-A76, HRV-A77, HRV-A78, HRV-A80, A81, HRV-A82, HRV-A85, HRV-A88, HRV-A89, HRV-A90, HRV-A94, HRV-A95, HRV-A96, HRV-A98, HRV-A100, HRV-A101, HRV-A102 and HRV-A103.

[0116] As used herein, the term “Rhinovirus B” also known as “Human rhinovirus B” refers to a species of the Enterovirus genus. The term “Rhinovirus B” encompasses human rhinovirus (HRV) serotypes such as HRV-B3, HRV-B4, HRV-B5, HRV-B6, HRV-B14, HRV-B17, HRV-B26, HRV-B27, HRV-B35, HRV-B37, HRV-B42, HRV-B48, HRV-B52, HRV-B69, HRV-B70, HRV-B72, HRV-B79, HRV-B83, HRV-B84, HRV-B86, HRV-B91, HRV-B92, HRV-B93, HRV-B97 and HRV-B99.

[0117] As used herein, the term “Hepatitis A virus” refers to a viral species belonging to the genus Hepatovirus and includes all serotypes within the Hepatitis A virus including hepatitis A virus 1.

[0118] As used herein, the terms “3C^{pro}”, “3C protease”, “picornavirus 3CP” or “picornavirus 3C protease” refer to a cysteine protease found in a picornavirus species, which typically contains a conserved Cysteine-Histidine-Aspartic Acid/Glutamic Acid catalytic triad or a Cysteine-Histidine dyad, (e.g., Hepatitis A virus) within its active site. The catalytic triad or dyad typically forms a charge-relay network that polarizes and activates the nucleophile (typically, cysteine) attacking the substrate to form a covalent intermediate, which is then hydrolyzed to regenerate free enzyme. 3C^{pro} has been reported to conduct maturation cleavage in the structural and non-structural regions of the polyprotein and to have significant substrate preference in Glutamine-Glycine/Serine/Alanine/Valine/Histidine/Arginine and Glutamic Acid-Serine/Glycine/Arginine/Methionine.

[0119] As used herein, an “FMDV 3C protease” refers to a picornavirus 3C protease from the FMDV species. Generally, FMDV 3C proteases are cysteine proteases having a molecular weight of about 23.1-kDa and which contain 213 amino acids. The cysteine-histidine-aspartic acid catalytic triad at the active site of the FMDV 3C protease is formed by the residues H46, D84 and C163. Structurally, FMDV 3C proteases adopt a chymotrypsin-like fold that contains an N-terminus β-barrel domain and a C-terminus β-barrel domain (see FIG. 2). Each of the β-barrel domains is composed of a pair of four-stranded anti-parallel β-sheets that pack together to form a peptide or substrate binding cleft. The β-sheets are composed of B₁, A1, D₁, E₁ β-strands and B₁, C₁, F₁, E₁ β-strands (N-terminus domain) and B₂, A₂, D₂, E₂ β-strands and B₂, C₂, F₂, E₂ β-strands (C-terminus domain), where the B and E strands of each domain contribute to both β-sheets. Other secondary structures of the N-terminus and C-terminus β-barrel domains include loops or turns connecting the β-strands, e.g., A₁-B₁, A₂-B₂, B₁-C₁, B₂-C₂, C₁-D₁, C₂-D₂, E₁-F₁, E₂-F₂ loops. N-terminus α-helices (“α_{N}”) and C-terminus α-helices (“α_{C}”) are also secondary structures found within FMDV 3C proteases.

[0120] In addition to the two 3-barrel domains, the FMDV 3C protease possesses another prominent tertiary structure in the form of a 3-strand having a small 3-sheet of two short anti-parallel 3-strands and an apical loop connecting the two 3-strands. As seen in FIG. 2, the 3-strand folds over the substrate binding cleft and active site and contributes to substrate recognition and specificity. The β-strand including the two β-strands and the apical loop is formed by residues 138 to 150 of the FMDV 3C protease, as indicated in FIG. 3.

[0121] As used herein, “primary structure” refers to the linear amino acid sequence of a protein, which chemically is a polypeptide chain composed of amino acids joined by peptide bonds.

[0122] As used herein, “secondary structure” refers to the three dimensional form of local segments of proteins. Secondary structure results from the interactions that occur between the carbon, oxygen and NH groups on amino acids in a polypeptide chain to form alpha-helices, beta-sheets, loops, β strands, and other forms that facilitate the folding of a peptide into a three dimensional structure. Particular examples of secondary structures include β sheets, such as A₂-B₂ β sheets, which are formed from a B₂ β strand and an A₂ β strand and A₁-B₁ β sheets which are formed from a B₁ β strand and an A₁ β strand. Other examples include the B₂′ β strand, which may be present in Aphthovirus species such as FMDV. See e.g., FIG. 13A. See also FIG. 3, which aligns exemplary secondary structures of an FMDV 3C protease with their corresponding residues in the amino acid sequence.

[0123] As used herein, an “altered secondary structure” refers to a disrupted or changed protein secondary structure, such as an alpha-helix or beta-sheet, in comparison to that of a parent protein, such as a wild type protein. Altered secondary structure may be effectuated, e.g., by substituting a residue in a secondary structure with proline as described herein.

[0124] As used herein, the term “protein conformation” refers to the characteristic 3-dimensional shape of a protein, including the secondary (helices, sheet, strand), supersecondary (motifs), tertiary (domains) and quaternary (multimeric proteins) structure of a peptide chain. The term “native conformation” as used herein refers to the characteristic state, formation, shape or structure of a wild type protein in its biologically active form in a living system.

[0125] As used herein, the term “structural homology” refers to a three dimensional structure that is shared between two or more nucleic acids or polypeptides, and which may or may not be associated with a shared or conserved primary amino acid or nucleotide sequence.

[0126] As used herein, a “modified 3C protease”, refers to a full-length 3C protease from a picornavirus species that is derived or obtained from a parent picornavirus 3C protease. As used herein “derived or obtained” refers to introducing into a parent amino acid sequence, or a polynucleotide encoding a parent amino acid sequence, at least one mutation e.g. a substitution, deletion or insertion of one or more amino acids or e.g. encoding for a substitution, deletion or insertion of one or more amino acids.

[0127] The term “parent” or “parent picornavirus 3C protease” as used herein refers to a picornavirus 3C protease to which a mutation is introduced in an encoding nucleotide sequence and/or polypeptide sequence to produce a modified picornavirus 3C protease of the present disclosure. The parent may be a wild type picornavirus 3C protease or a 3C protease that differs from wild type. That is, a parent 3C protease can be mutated, such that it differs from a wild type 3C protease, but is nonetheless referred to herein as a parent polypeptide relative to the subsequently modified polypeptide. Thus, existing 3C proteases known in the art that have been modified to have a desired increase or decrease in a particular activity, property or trait as compared to an unmodified reference protein, such as a wild type 3C protease, can be selected and used as a starting polypeptide, i.e., used as a parent polypeptide. For example, a 3C protease that has been modified from its native form by one or more single amino acid changes and possesses either an increase or decrease in a desired property, such as an increase or decrease in its ability to process P1 precursor polypeptide in comparison to an unmodified reference protein such as a wild type 3C protease, may be used as a parent and subjected to further modification to obtain a modified 3C protease of the present disclosure, which possesses the same or a different property.

[0128] The term “mutation” as used herein indicates any genetic modification of a nucleic acid and/or polypeptide resulting in an altered nucleic acid or an altered polypeptide. Mutations include, but are not limited to point mutations, deletions, and/or insertions of single or multiple nucleotides in a polynucleotide, which include alterations arising within a protein-encoding region of a gene as well as alterations in regions outside of a protein-encoding sequence, such as, but not limited to, regulatory or promoter sequences. Mutations may result in a silent, frame-shift or a nonsense mutation.

[0129] The terms “mutated”, “mutant”, “modified”, “altered”, “variant”, and “engineered” are used interchangeably in the present application as adjectives describing a nucleotide sequence or a protein, such as a picornavirus 3C protease, that has been changed in reference to a parent 3C protease. As a non-limiting example, a “mutated nucleotide sequence encoding for a picornavirus 3C protease” refers to a nucleotide sequence encoding for a picornavirus 3C protease that is modified to be different from a parent, such as a wild-type, nucleotide sequence encoding for a picornavirus 3C protease. The mutated nucleotide sequence may or may not result in at least one of the following: one or more amino acid substitutions and a shift in the open reading frame for the translated peptide product, which folds properly (and may be functional or non-functional). In another non-limiting example, a “mutated picornavirus 3C protease”, a “mutant picornavirus 3C protease”, a “modified picornavirus 3C protease” or an “altered picornavirus 3C protease” refers to a picornavirus 3C protease expressed from a mutated nucleotide sequence encoding for a picornavirus 3C protease, wherein the amino acid sequence has been changed, as compared to the wild-type picornavirus 3C protease, by e.g., one or more amino acid substitutions or a deletion of part of the protease (usually from the C-terminus), which may also lead to a change in one or more of the protein/protease properties, including but not limited to protein expression levels (e.g., transgene expression), substrate specificity, proteolytic activity towards picornavirus polypeptide precursors, proteolytic activity towards host proteins, thermal stability, solubility, etc.

[0130] A mutant, variant or modified polypeptide may have 75, 80, 85, 90, 95, 97.5, 98, 99, or 100% sequence identity or sequence similarity with a known picornaviral polynucleotide or polypeptide sequence, such as those described herein and in the sequence listing.

[0131] BLASTN may be used to identify a polynucleotide sequence having at least 75%, 80%, 85%, 87.5%, 90%, 92.5%, 95%0, 97.5%, 98%0, 99% sequence identity to a reference polynucleotide. A representative BLASTN setting optimized to find highly similar sequences uses an Expect Threshold of 10 and a Wordsize of 28, max matches in query range of 0, match/mismatch scores of 1/−2, and linear gap cost. Low complexity regions may be filtered or masked. Default settings of a Standard Nucleotide BLAST are described by and incorporated by reference to blast.ncbi.nlm.nih.gov/_Blast.cgi?PROGRAM=blastn&BLAST_PROGRAMS=megaBlast&PAGE_TYPE=BlastSearch&SHOW_DEFAULTS=on&LINK_LOC=blasthome (last accessed Feb. 4, 2016).

[0132] BLASTP can be used to identify an amino acid sequence having at least 75%, 80%, 85%, 87.5%, 90%, 92.5%, 95%, 97.5%, 98%, 99% sequence identity, or similarity to a reference amino acid using a similarity matrix such as BLOSUM45, BLOSUM62 or BLOSUM80 where BLOSUM45 can be used for closely related sequences, BLOSUM62 for midrange sequences, and BLOSUM80 for more distantly related sequences. Unless otherwise indicated a similarity score will be based on use of BLOSUM62. When BLASTP is used, the percent similarity is based on the BLASTP positives score and the percent sequence identity is based on the BLASTP identities score. BLASTP “Identities” shows the number and fraction of total residues in the high scoring sequence pairs which are identical; and BLASTP “Positives” shows the number and fraction of residues for which the alignment scores have positive values and which are similar to each other. Amino acid sequences having these degrees of identity or similarity or any intermediate degree of identity or similarity to the amino acid sequences disclosed herein are contemplated and encompassed by this disclosure. A representative BLASTP setting that uses an Expect Threshold of 10, a Word Size of 3, BLOSUM 62 as a matrix, and Gap Penalty of 11 (Existence) and 1 (Extension) and a conditional compositional score matrix adjustment. Other default settings for BLASTP are described by and incorporated by reference to the disclosure available at: blast.ncbi.nlm.nih.gov/_Blast.cgi?PROGRAM=blastp&PAGE_TYPE=BlastSearch&LINK_LOC=blasthome (last accessed Jun. 29, 2016).

[0133] The term “mutant”, when used herein as a noun, depending on the context, or the term “variant” encompasses the following: a mutant nucleotide sequence encoding for a picornavirus 3C protease, a mutant picornavirus 3C protease, a transgene expression cassette containing a mutant nucleotide sequence encoding for a picornavirus 3C protease, and a vector carrying a mutant nucleotide sequence encoding for a picornavirus 3C protease. As a non-limiting example, a “C163A mutant”, or a “3C(163A) mutant”, depending on the context, refers to one of the following: a nucleotide sequence encoding for a picornavirus 3C protease, such as an FMDV 3C protease, wherein the cysteine residue at position 163 is substituted with an alanine, a picornavirus 3C protease, such as an FMDV 3C protease, wherein the cysteine residue at position 163 is substituted with an alanine, a transgene expression cassette containing a nucleotide sequence encoding for a picornavirus 3C protease, such as an FMDV 3C protease, wherein the cysteine residue at position 163 is substituted with an alanine, and a vector carrying a nucleotide sequence encoding for a picomavirus 3C protease, such as an FMDV 3C protease, wherein the cysteine residue at position 163 is substituted with an alanine.

[0134] As used herein, “substituted” and “substitutions” refer to the replacement of one or more amino acid residue(s) or nucleotide(s) at a particular position in a parent sequence (such as a wild type polypeptide sequence or a wild type polynucleotide sequence) with another amino acid or a codon encoding for an amino acid not present in the parent. For example, the substitution V124P refers to a modified polypeptide in which the valine at position 124 in a parent 3C protease is replaced with a proline.

[0135] The term “control picornavirus 3C protease” or “control 3C protease” as used herein refers to a picomavirus 3C protease having an activity, property, transcription level and/or translation level, which is compared to that of a modified picornavirus 3C protease of the present disclosure. A control picomavirus 3C protease has the same primary amino acid sequence as a modified picornavirus 3C protease except that it does not contain the one or more amino acid substitutions located at positions corresponding to positions 16-25, 99-100 and 115-130 of a wild-type FMDV 3C protease as described herein. In some embodiments, a control picornavirus 3C protease is a parent picornavirus 3C protease, such as a wild type 3C protease. In other embodiments, a control picornavirus does not contain the one or more amino acid substitutions located at positions corresponding to positions 20-25, 99-100 and 115-128 of a wild-type FMADV 3C protease, but contains other mutations. For example, a control 3C protease may have the same primary sequence as a wild type FMDV 3C protease, except for a mutation at the catalytic triad, for example C 163A.

[0136] The terms “wild-type”, its acronym “wt”, and the term “native” refer to a biological molecule that has not been genetically modified, for example, a nucleotide sequence encoding for a picornavirus 3C protease that exists in nature and has not been genetically modified, a picornavirus 3C protease translated from a coding nucleotide sequence that exists in nature and has not been genetically modified, a transgene expression cassette containing a nucleotide sequence encoding for a picomavirus 3C protease that exists in nature and has not been genetically modified, and a vector carrying a nucleotide sequence encoding for a picornavirus 3C protease that exists in nature and has not been genetically modified.

[0137] As used herein, “a P1 precursor”, “a P1 precursor polypeptide” or “P1 precursor protein” is a polypeptide comprising structural proteins and/or precursors of the following structural proteins, VP0, VP1, VP2, VP3, and VP4, as well as the 2A translational interrupter. P1 precursors may be derived or obtained from any of the picornavirus genera, species, serotypes or strains described herein, e.g., a P1 precursor may be obtained or derived from wild type FMDV, which is around 85 kDa in molecular weight.

[0138] As used herein, the phrase “exhibits proteolytic activity on a picornavirus P1 polypeptide” refers to the processing of a P1 precursor polypeptide into structural proteins, e.g., VP0, VP1 and VP3 by a 3C protease. Typically, the structural proteins self-assemble into a non-enveloped icosahedral capsid and/or Virus-Like Particles “VLPs.”

[0139] As used herein, “Virus-Like Particles” or “VLPs” refer to structures that are typically assembled into viral envelopes or viral capsids and, thus, resemble viruses, but are non-infectious since they lack viral genetic material. VLPs are typically capable of stimulating an immune response similar to a full virus.

[0140] As used herein, the term “VP0 protein” refers to a precursor peptide comprised of the VP2 and VP4 structural proteins. The VP0 protein is produced by the processing of the P1 precursor protein by a picornavirus 3C protease. In some embodiments, the VP0 protein along with VP3 and VP1 may be used in capsid and/or VLP assembly.

[0141] As used herein, “2A” refers to an FMDV translation interrupter sequence, see Luke, et al., Biotech. Genetic Eng. Revs. 26:223-260 (2009), which is herein incorporated by reference in its entirety. A 2A polynucleotide sequence is described by nucleotides 34-87 of SEQ ID NO: 645 and by the amino acid residues encoded thereby. Other 2A sequences may conform to the amino acid motif described by SEQ ID NO: 647. 2A interrupters from other Aphthoviruses may also be used.

[0142] As used herein, the term “A1D2A” refers to a translation termination sequence that typically comprises FMDV 1D residues and FMDV 2A amino acid residues. The polynucleotide sequence of SEQ ID NO: 645 encodes the Δ1D2A polypeptide of SEQ ID NO: 646. Other degenerate sequences encoding the polypeptide of SEQ ID NO: 646 may also be used. Polynucleotides 1-33 encode FMDV ID residues, 34-87 encode the 2A amino acid residues, and 88-90 encode a C-terminal proline residue as shown in SEQ ID NOS: 645 and 646. Other translation termination sequences similar to Δ1D2A may have fewer or more residues of the ID protein than A1D2A or may contain 1, 2, 3 or more point mutations to the 2A sequence that do not affect its ability to act as a translation termination sequence.

[0143] As used herein, “Gaussia luciferase” (GLuc) refers to a small, naturally secreted luciferase of 185 amino acids (SEQ ID NO: 649) and the nucleic acid encoding the secreted luciferase. The term is also meant to encompass proteins having at least 90%, such as at least 95% or such as at least 99% sequence identity with a native GLuc protein, for example, as set forth in SEQ ID NO: 649 and the nucleic acids encoding GLuc variants exhibiting luciferous properties. Typically, GLuc has a higher intensity than that of firefly or Renilla luciferases.

[0144] As used herein, “SGLuc” refers to a super luminescent GLuc variant (e.g., SEQ ID NO: 651) useful for examination of low levels of protein expression. SGLuc variants typically contain a mutation at amino acids 89 and 90 of a Gaussia luciferase gene (GLuc) gene, which expresses a secretory form of a GLuc luciferase and/or which expresses a GLuc luciferase that is capable of being secreted.

[0145] As used herein, a “vector” refers to any means by which a nucleic acid can be propagated and/or transferred between organisms, cells, or cellular components. Vectors include viruses, bacteriophage, pro-viruses, plasmids, phagemids, transposons, cosmids, viral vectors, expression vectors, gene transfer vectors, minicircle vectors, and artificial chromosomes such as YACs (yeast artificial chromosomes), BACs (bacterial artificial chromosomes), and PLACs (plant artificial chromosomes), and the like, that are “episomes,” that is, that replicate autonomously or can integrate into a chromosome of a host cell. A vector typically contains at least an origin of replication, a cloning site and a selectable marker (e.g., antibiotic resistance). Natural versions of the foregoing non-limiting examples may be isolated, purified, and/or modified so the resultant natural version is differentiable from the material in its natural state. A vector can also be a naked RNA polynucleotide, a naked DNA polynucleotide, a polynucleotide composed of both DNA and RNA within the same strand, a polylysine-conjugated DNA or RNA, a peptide-conjugated DNA or RNA, a liposome-conjugated DNA, or the like, that are not episomal in nature, or it can be an organism which comprises one or more of the above polynucleotide constructs such as an Agrobacterium or a bacterium.

[0146] The term “recombinant vector” as used herein is defined as a vector produced by joining pieces of nucleic acids from different sources.

[0147] A “minicircle DNA vector”, “minicircle vector” or “minicircle” is a small (usually in the range of 3-4 kb, or usually no larger than 10 kb) circular, episomal plasmid derivative wherein all prokaryotic vector parts (e.g., bacterial origin of replication, genes associated with bacterial propagation of plasmids) have been removed. Since minicircle vectors contain no prokaryotic DNA sequences, they are less likely to be perceived as foreign and destroyed when they are employed as vehicles for transferring transgenes into target mammalian cells.

[0148] A “transgene expression cassette”, a “transgene expression construct”, an “expression cassette”, an “expression construct”, a “construct”, a “chimera”, a “chimeric DNA”, a “DNA chimera” or a “chimeric gene” is a nucleic acid sequence that has been artificially constructed to comprise one or more functional units (e.g. promoter, control element, consensus sequence, translational frameshift sequence, protein encoding gene etc.) not found together in nature, and is capable of directing the expression of any RNA transcript in an organism that the cassette has been transferred to, including gene encoding sequence(s) of interest as well as non-translated RNAs, such as shRNAs, microRNAs, siRNAs, and anti-sense RNAs. A transgene expression cassette may be single- or double-stranded and circular or linear. A transgene expression cassette can be constructed, inserted or cloned into a vector, which serves as a vehicle for transferring, replicating and/or expressing nucleic acid sequences in target cells.

[0149] As used herein, the term “transformation” refers to the process by which a vector or polynucleotide construct is introduced into a host cell. Transformation (or transduction, or transfection), can be achieved by any one of a number of means including chemical transformation (e.g. lithium acetate transformation), electroporation, microinjection, biolistics (or particle bombardment-mediated delivery), or Agrobacterium mediated transformation.

[0150] As used herein, “transfection” refers to the process by which a nucleic acid such as a gene cloned inside a vector (DNA or RNA) is delivered into a eukaryotic host cell.

[0151] As used herein, the term “host cell” refers to a prokaryotic (e.g. bacterial) or a eukaryotic cell (e.g. mammalian, insect, yeast etc.) that is naturally infected or artificially transfected or transformed with a virus or a vector, for example, by vaccination. The virus introduced to the host cell may be live, inactivated, attenuated or modified, while the vector introduced carries a transgene expression cassette that, when expressed in the host cell, may produce viral structural proteins that self-assemble to form virus-like particles (VLPs). In some cases, a host cell is inside of a host or subject and the host or subject is treated by administering a nucleic-acid-based vaccine encoding a modified picornavirus 3C protease of the instant disclosure, such as a modified FMDV 3C protease, and at least one other picomavirus antigen, such as an FMDV P1 precursor. In some embodiments, a modified picornavirus 3C protease-encoding polynucleotide is incorporated into a host cell genome via recombination, by use of a transposon, or by other recombinant DNA methods well known in the art. Picornavirus 3C proteases, such as an FMDV 3C proteases, and other picornavirus antigens, such as an FMDV P1 precursor, may be expressed from the same or different plasmids, episomes and/or other DNA or RNA constructs inside of a host cell.

[0152] A host cell for expression of a picornavirus 3C protease, a picornavirus P1 precursor protein, other proteins or antigenic sequences, as well as other proteins of interest may be a prokaryotic or eukaryotic cell. The term “host cell” includes yeast or fungal host cells, such as those of Saccharomyces cerevisiae, or Pichia pastoris; plant host cells, such as those of Arabidopsis thaliana, Chlamydomonas reinhardtii, Glycine mar, Nicotiana benthamiana, Nicotiana tabacum, Oryza sativa, or Zea mays: insect cells or insect cell lines such as those of Spodoptera frugiperda, Drosophila melanogaster. Sf9, or Sf21; the cells of vertebrates or mammals or mammalian cell lines, such as a HEK-293 (human kidney embryo) cell, CHO (Chinese hamster ovary) cell, BHK-21 (Syrian hamster kidney) cell, LF-BK (porcine cell), LF-BK αV/β6, or cells of animals susceptible to picornaviral infection; prokaryotic host cells such as those of gram-positive bacteria including cells of Bacillus, Lactococcus, Streptomyces, Rhodococcus, Corynebacterium, Mycobacterium or gram-negative bacteria such as Escherichia or Pseudomonas.

[0153] As used herein, the terms “residue” or “amino acid residue” refer to a specific amino acid within a polymeric chain of a peptide, a polypeptide or a protein. The terms encompass any of the twenty-two conventional proteinogenic amino acid residues (which include selenocysteine and pyrrolysine), a modified proteinogenic amino acid residue and/or a non-proteinogenic amino acid residue. Throughout the present disclosure, an amino acid residue may be represented by a three-letter code or a single-letter code, including but not limited to Ala (A) for alanine, Arg (R) for arginine, Asn (N) for asparagine, Asp (D) for aspartic acid, Cys (C) for cysteine, Gln (Q) for glutamine, Glu (E) for glutamic acid, Gly (G) for glycine, His (H) for histidine, Ile (I) for isoleucine, Leu (L) for leucine, Lys (K) for lysine, Met (M) for methionine, Phe (F) for phenylalanine, Pro (P) for proline, Ser (S) for serine, Thr (T) for threonine, Trp (W) for tryptophan, Tyr (Y) for tyrosine, Val (V) for valine, Pyl (O) for pyrrolysine, Sec (U) for selenocysteine.

[0154] The terms “amino acid sequence”, “peptide sequence” or “protein sequence” refer to the order in which amino acid residues, connected by peptide bonds, arise in a peptide or protein chain. An amino acid sequence is generally reported from the N-terminal end containing a free amino group to the C-terminal end containing free carboxyl group. As used herein, a “non-coded amino acid”, a “non-proteinogenic amino acid”, a “synthetic amino acid” or an “unnatural amino acid” refers to an amino acid that is not naturally encoded or found in the genetic code (DNA or mRNA) of any organism, and has to therefore be synthesized in vitro.

[0155] A “genetically coded amino acid”, a “coded amino acid” or a “natural amino acid” refers to an amino acid that is naturally encoded by or found in the genetic code (DNA or mRNA) of an organism, such as alanine, arginine, asparagine, aspartic acid, cysteine, glutamine, glutamic acid, glycine, histidine, isoleucine, leucine, lysine, methionine, phenylalanine, proline, serine, threonine, tryptophan, tyrosine, valine, pyrrolysine and selenocysteine.

[0156] As used herein, the terms “prevent” and “preventing” include the prevention of the recurrence, spread or onset of a disease, disorder, condition and/or infection, such as a picornaviral infection. It is not intended that the present disclosure be limited to complete prevention. In some embodiments, prevention delays disease onset, reduces severity, reduces contagion, or otherwise alters disease symptoms and presentation.

[0157] As used herein, the terms “treat” and “treating” encompass a delay in disease progression, a decrease of particular symptoms, a reduction of contagion, or otherwise affects disease presentation, symptoms or progression. Prevention or treatment with a vaccine according to the present disclosure may involve the induction of cellular (e.g., via T-cells) or humoral (e.g., via antibodies) immunity. Such a vaccine will usually contain one or more picornavirus antigens, such as one or more FMDV antigens, produced by a host cell expressing a modified picomavirus 3C protease, such as a modified FMDV 3C protease. However, DNA-based vaccines that express modified picornavirus 3C protease, such as a modified FMDV 3C protease and other picornavirus antigens, such as other FMDV antigen(s) are also contemplated.

[0158] The term “in vivo” when referencing a reaction, such as the production of picornavirus VLPs, gene expression (e.g., of an FMDV polypeptide precursor, a wild-type or modified FMDV 3C protease, etc.), DNA transcription, mRNA translation, cleaving of a picornaviral, such as an FMDV, polypeptide precursor (e.g. P1, etc.), means that the reaction takes place within the environment of a living cell, such as a viral host cell. The living cell may be a living cell inside a host or other organism or in an artificial culture medium.

[0159] As used herein, the term “in vitro” in reference to a reaction, such as the production of VLPs, gene expression (e.g. expression of an FMDV polypeptide precursor, a wild-type or modified FMDV 3C protease, etc.), DNA transcription, mRNA translation, cleaving of a picornaviral, such as an FMDV, polypeptide precursor (e.g. P1, etc.), means that the reaction takes place in any environment with the exception of a living cell, including a solution, a liquid/solid culture medium in a test tube, a flask, a petri dish, etc.

### DETAILED DESCRIPTION

[0160] Polynucleotides and Polypeptides with Modifications at Locations Corresponding to Amino Acid Positions in FMDV 3C Proteases

[0161] FMDV Corresponding Positions

[0162] One aspect of the present disclosure is directed to an isolated polynucleotide encoding a modified picornavirus 3C protease. In some embodiments, the modified picornavirus 3C protease encoded by the isolated polynucleotide includes one or more amino acid substitutions located at position(s) corresponding to amino acid position(s) 16-25, 99-100 and 115-130 of a wild-type FMDV 3C protease, such as the wild-type FMDV 3C protease sequences set forth as amino acid SEQ ID NOS: 2, 4, 6, 10, 12, 14, 16, 18 and 20. Modified 3C proteases encoded by such isolated polynucleotides are also contemplated.

[0163] Other Picornaviral Corresponding Positions

[0164] In some aspects, the present disclosure is also directed to an isolated polynucleotide encoding a modified picornavirus 3C protease, wherein the modified picornavirus 3C protease is selected from among, for example, a modified Bovine rhinitis 3C protease including one or more amino acid substitutions located at a position corresponding to one or more of amino acid positions 22, 23, 96, 97, 121, 123 and 124 of a wild type Bovine rhinitis 3C protease; a modified Equine rhinitis 3C protease including one or more amino acid substitutions located at a position corresponding to one or more of amino acid positions 23, 100, 125 and 127 of a wild type Equine rhinitis 3C protease; a modified Human coxsackievirus 3C protease including one or more amino acid substitutions located at a position corresponding to one or more of amino acid positions 19, 20, 87, 102, 104, 105, 106, 109, 112 and 114 of a wild type Human coxsackievirus 3C protease; a Human enterovirus 3C protease including one or more amino acid substitutions located at a position corresponding to one or more of amino acid positions 19, 20, 104, 105, 106 and 109 of a wild type Human enterovirus 3C protease; a Human poliovirus 3C protease including one or more amino acid substitutions located at a position corresponding to one or more of amino acid positions 19, 20, 100, 119, 121, 128 and 130 of a wild type Human poliovirus 3C protease; and/or wherein the modified picornavirus 3C protease is a Human rhinovirus 3C protease including one or more amino acid substitutions located at a position corresponding to one or more of amino acid positions 19, 20, 87, 88, 102, 104, 108, 112 and 114 of a wild type Human rhinovirus 3C protease; a Hepatitis A virus 3C protease including one or more amino acid substitutions located at a position corresponding to one or more of amino acid positions 19, 20, 100, 119, 121, 128 and 130 of a wild type Human hepatitis 3C protease. Modified 3C proteases encoded by such isolated polynucleotides are also contemplated.

[0165] Exemplary Wild Type Sequences

[0166] In some embodiments, an isolated polynucleotide sequence encoding a parent picornavirus 3C protease or a parent picornavirus 3C protease is modified to produce the isolated polynucleotides encoding the modified picornavirus 3C proteases and/or the modified picornavirus 3C proteases of the present disclosure. In some embodiments, a parent polynucleotide or parent polypeptide to be modified may be obtained or derived from any wild type picornavirus 3C protease, such as from any picornavirus genus, species, subtype, idiotype, strain and/or isolate known in the art and provided herein. For example, the parent polynucleotides encoding for a parent picornavirus 3C proteases or a parent picornavirus 3C protease may be obtained or derived from any of the picornavirus genera including Aphthovirus, Aquamavirus, Avihepatovirus, Cardiovirus, Cosavirus, Dicipivirus, Enterovirus, Erbovirus, Hepatovirus, Kobuvirus Megrivirus, Parechovirus, Piscevirus, Salivirus, Sapelovirus, Senecavirus, Teschovirus and Tremovirus. Particularly suitable genera include Aphthovirus, Enterovirus and Hepatovirus.

[0167] Particularly suitable species within the Aphihovirus genus from which a parent polynucleotide encoding a 3C protease or a parent 3C protease may be obtained or derived to produce the isolated polynucleotide encoding the modified picornavirus 3C protease of the present disclosure and/or the present modified picornavirus 3C proteases include any serotype, subtype, topotype and/or strain within a serotype of FMD, e.g., the A, O, C, Asia 1, SAT1, SAT2 and SAT3 serotypes, Bovine rhinitis A virus, such as from strain sd-1, Bovine rhinitis B virus and Equine rhinitis A virus. Particular examples of suitable wild-type FMDV 3C proteases include those set forth in SEQ ID NO: 2 (A Turkey 2006), SEQ ID NO: 4 (A24 Cruzeiro iso71), SEQ ID NO: 6 (Asia Lebanon 89, serotype Asia 1), SEQ ID NO: 8 (Asial Shamir), SEQ ID NO: 10 (C3 Indaial), SEQ ID NO: 12 (01 PanAsia), SEQ ID NO: 14 (01 Manisa isolate 87 strain, serotype O), SEQ ID NO: 16 (SAT1-20 iso11), SEQ ID NO: 18 (SAT2 Egypt 2010) and SEQ ID NO: 20 (SAT3 ZIM/6/91). Examples of suitable parent FMDV polynucleotide 3C protease sequences include those set forth in SEQ ID NOS: 1, 3, 5, 7, 9, 11, 13, 15, 17 and 19, which encode SEQ ID NOS: 2, 4, 6, 8, 10, 12, 14, 16, 18 and 20, respectively. Examples of wild type Bovine rhinitis 3C proteases that may be used as a parent 3C protease include SEQ ID NO: 422 (Bovine rhinitis A virus) and SEQ ID NO: 434 (Bovine rhinitis B virus). Examples of suitable parent Bovine rhinitis polynucleotide 3C protease sequences include those set forth in SEQ ID NOS: 421 (Bovine rhinitis A virus) and 433 (Bovine rhinitis B virus). An example of a wild type Equine rhinitis 3C protease that may be used as a parent includes SEQ ID NO: 444. An example of a suitable parent Equine rhinitis polynucleotide 3C protease sequence include that set forth as SEQ ID NOS: 443.

[0168] Particularly suitable Enterovirus species from which a parent polynucleotide encoding a 3C protease or a parent 3C protease may be obtained or derived from species including Enterovirus A, Enterovirus B, Enterovirus C, Rhinovirus A and Rhinovirus B. Suitable Enterovirus A serotypes and strains include Human coxsackievirus A10, such as the Kowalik strain and Human enterovirus A71, such as Human Enterovirus A71, C4 strain. Suitable Enterovirus B serotypes and strains include Human Coxsackievirus B1, Human Coxsackievirus B3, such as the Macocy strain and Human Coxsackievirus B5, such as swine vesicular disease virus, e.g. a parent 3C protease, such as wild type swine vesicular disease virus 3C protease as set forth in SEQ ID NO: 640. Suitable Enterovirus C serotypes, strains and isolates include Human Coxsackievirus A1, such as the Tompkins strain, Human Poliovirus 1, such as the Mahoney strain, Human Poliovirus 2, such as strain R93152 and Human Poliovirus 3, such as Isolate CHN5275/JX/CHN/2001. Particularly suitable Rhinovirus A serotypes and strains include Human rhinovirus A2, Human rhinovirus A20, such as strain VR1130 and Human rhinovirus A89, such as strain RI 199. Suitable Rhinovirus B serotypes include Human rhinovirus B14. Particularly suitable Hepatovirus species include Human hepatitis A Virus.

[0169] Specific examples of suitable parent Enterovirus 3C proteases include a wild type Human coxsackievirus A10 3C protease set forth as SEQ ID NO: 478, a wild type Human coxsackievirus B1 3C protease set forth as SEQ ID NO: 480, a wild type Human coxsackievirus B3 3C protease set forth as SEQ ID NO: 510, a wild type Human coxsackievirus A1 3C protease set forth as SEQ ID NO: 462 and a wild type Human enterovirus A71 3C protease set forth as SEQ ID NO: 526. A particularly suitable Human hepatitis A Virus for use as a parent is set forth as SEQ ID NO: 538.

[0170] Examples of suitable parent polynucleotides encoding Enterovirus 3C proteases include those encoding a wild type Human coxsackievirus A10 3C protease set forth as SEQ ID NO: 477, a wild type Human coxsackievirus B1 3C protease set forth as SEQ ID NO: 479, a wild type Human coxsackievirus B3 3C protease set forth as SEQ ID NO: 509, a wild type Human coxsackievirus A1 3C protease set forth as SEQ ID NO: 461, a wild type Human enterovirus A71 3C protease set forth as SEQ ID NO: 525 and a wild type swine vesicular disease virus 3C protease as set forth in SEQ ID NO: 439. A particularly suitable Human hepatitis A Virus for use as a parent is set forth as SEQ ID NO: 537.

[0171] Other suitable picornaviruses that may be used to obtain or derive parent picomavirus 3C proteases suitable for modification include those from the Teschovirus genus, such as a Porcine Teschovirus 3C protease, as set forth in SEQ ID NO: 636, for example, and the Senecavirus genus, such as a Seneca Valley virus 3C protease as set forth in SEQ ID NO: 638. An example of a suitable parent polynucleotide encoding a Porcine Teschovirus 3C protease includes a wild type Porcine Teschovirus 3C protease set forth as SEQ ID NO: 635. An example of a suitable parent polynucleotide encoding a Seneca Valley virus 3C protease includes a wild type Seneca Valley virus 3C protease set forth as SEQ ID NO: 637.

[0172] The wild type 3C protease sequences and the isolated polynucleotides encoding the wild type 3C proteases described above and throughout the present disclosure may be used in any of the embodiments described herein as either a parent picornavirus 3C protease, which is modified to achieve a modified picornavirus 3C protease and/or an isolated polynucleotide encoding the modified picornavirus 3C protease of the present disclosure and/or as, e.g., a template for alignment to determine positions in a picornaviral 3C protease corresponding to e.g., wild type FMDV 3C protease amino acid positions 16-25, 99-100 and 115-130 or the codons encoding such positions.

[0173] Determination of Corresponding Positions

[0174] The position(s) in the parent picornavirus 3C protease corresponding to amino acid position(s) 16-25, 99-100 and 115-130 of a wild-type FMDV 3C protease, for example, may be determined using comparative modeling. In these embodiments, a 3-dimensional model of a parent 3C protease may be constructed from the primary amino acid sequence on the basis of the known three-dimensional structure of an FMDV 3C protease. In order to be able to construct a model, it is normally desirable that the parent picornavirus 3C protease displays at least 30% sequence identity with the e.g., FMDV 3C protease. The model structure may be constructed using any suitable software known in the art, e.g., Modeller (Andrej Sali, Roberto Sanchez, Azat Badretdinov, Andras Fiser, and Eric Feyfant, The Rockefeller University, 1230 York Avenue, New York, N.Y. 10021-6399, USA) or WHAT IF: A molecular modeling and drug design program (G. Vriend, J. Mol. Graph. (1990) 8, 52-56), which is herein incorporated by reference in its entirety. Comparative models so generated can be scored for three dimensional structural similarity to the structure of an FMDV 3C protease. For example, a program such as TM align, the DALI server (e.g., DaliLite v.3 available at ekhidna.biocenter.helsinki.fi/dali_server) or the cealign algorithm implemented in PyMOL (e.g., version 1.7.6 available at www.pymol.org) can be used to assess structural similarity by calculating a TM align score, Z-score, or an RMSD value respectively.

[0175] More typically, however, the corresponding position(s) are conveniently determined on the basis of an alignment between one or more primary amino acid sequence(s) obtained or derived from one or more parent picornavirus 3C protease(s), typically wild type 3C proteases, and one or more primary amino acid sequence(s) obtained or derived from one or more wild type 3C proteases, such as one or more wild type FMDV 3C protease(s). The primary amino acid sequence(s) can be aligned by any method known to those of skill in the art. Such methods typically maximize matches and include methods using manual alignments and/or use any of the numerous alignment programs available (e.g., BLASTP and CLUSTALW version 1.74 using default parameters (Thompson et al., 1994, CLUSTAL W: “Improving the sensitivity of progressive multiple sequence alignment through sequence weighting, position-specific gap penalties and weight matrix choice”, Nucleic Acids Research, 22:4673-4680)), which is herein incorporated by reference in its entirety. In some embodiments, Clone Manager 9, Professional Edition, Version 9.4, 1 Jan. 2015, using Blossum 62 with default parameters, is used to prepare the alignments to determine the corresponding amino acid(s) that may be substituted in a parent 3C protease to achieve the modified 3C protease encoded by the isolated polynucleotide of the present disclosure and/or to achieve a modified 3C protease of the present disclosure.

[0176] Examples of Corresponding Positions

[0177] In some embodiments, the modified picornavirus 3C protease encoded by the isolated polynucleotide of the present disclosure and/or the present modified 3C proteases is a parent picornavirus 3C protease modified to include one or more amino acid substitutions located at position(s) corresponding to amino acid positions 16-25, such as amino acid positions 22 and 23, of a wild-type FMDV 3C protease. Examples of amino acid positions in a parent picornavirus 3C protease corresponding to positions 22 and 23 of a wild type FMDV 3C protease include, for example, I22 and L23, respectively, of a wild type Aphthovirus 3C protease, such as a wild type FMDC 3C protease, V22 and C23, respectively, of a wild type Aphthovirus 3C protease, such as a wild type Bovine rhinitis A virus 3C protease, V22 and R23, respectively, of a wild type Aphthovirus 3C protease, such as a wild type Bovine rhinitis B virus 3C protease and Y22 and C23, respectively, of a wild type Aphthovirus 3C protease, such as a wild type Equine rhinitis A virus 3C protease. See, e.g., FIG. 4 depicting an alignment between a wild type FMDV 3C protease, a Bovine rhinitis A virus 3C protease, a Bovine rhinitis B virus 3C protease and an Equine rhinitis A virus 3C protease.

[0178] In some embodiments, the modified picornavirus 3C protease encoded by the isolated polynucleotide and/or the modified 3C proteases of the present disclosure is a picornavirus 3C protease including one or more amino acid substitutions located at position(s) corresponding to amino acid positions 16-25, such as amino acid positions 20 and 21, of a wild-type FMDV 3C protease. Examples of amino acid positions in a parent picornavirus 3C protease corresponding to positions 20 and 21 of a wild type FMDV 3C protease include, for example, Q19 and T20, respectively, of a wild type Enterovirus A 3C protease, such as a wild type Human coxsackievirus A10 3C protease and Q19 and T20, respectively, of a wild type Enterovirus A 3C protease, such as a wild type Human enterovirus A71 3C protease. See, e.g., FIG. 5 and FIG. 6.

[0179] In other embodiments, positions corresponding to amino acid positions 20 and 21 of a wild-type FMDV 3C protease include, for example, K19 and T20, respectively, of a wild type Enterovirus B 3C protease, such as a wild type Human coxsackievirus B1 or B3 3C protease. See, e.g., FIG. 7.

[0180] Examples of amino acid positions in a parent picornavirus 3C protease corresponding to positions 21 and 22 of a wild type FMDV 3C protease further include, for example, T19 and T20, respectively, of a wild type Enterovirus C 3C protease, such as a wild type Human coxsackievirus A1 3C protease and a wild type Human poliovirus 3C protease. See, e.g., FIG. 5 and FIG. 8.

[0181] In other embodiments, positions corresponding to amino acid positions 21 and 22 of a wild-type FMDV 3C protease include, for example, T19 and T20, respectively, of a wild type Rhinovirus A 3C protease. See, e.g., FIG. 9.

[0182] In some embodiments, the modified picornavirus 3C protease encoded by the isolated polynucleotide and/or the modified 3C proteases of the present disclosure is a picornavirus 3C protease including one or more amino acid substitutions located at position(s) corresponding to amino acid positions 16-25, such as amino acid positions 16 and 17, of a wild-type FMDV 3C protease. Examples of amino acid positions in a parent picornavirus 3C protease corresponding to positions 16 and 17 of a wild type FMDV 3C protease include, for example, T19 and T20, respectively, of a wild type Rhinovirus B 3C protease. See, e.g., FIG. 10.

[0183] In some embodiments, the modified picornavirus 3C protease encoded by the isolated polynucleotide and/or the modified picomavirus 3C protease of the present disclosure includes one or more amino acid substitutions located at position(s) corresponding to amino acid positions 16-25, such as amino acid positions 16, 17, 24 and 25, of a wild-type FMDV 3C protease. Examples of amino acid positions in a parent picornavirus 3C protease corresponding to positions 16, 17, 24 and 25 of a wild type FMDV 3C protease include, for example, G17, V18, G19 and E20, respectively, of a wild type Hepatitis A virus 3C protease. See, e.g., FIG. 11.

[0184] In some embodiments, the modified picornavirus 3C protease encoded by the isolated polynucleotide and/or the modified picornavirus 3C protease of the present disclosure includes one or more amino acid substitution(s) located at position(s) corresponding to amino acid positions 115-130, such as amino acid positions 123-128, of a wild-type FMDV 3C protease. Examples of positions in picornavirus 3C proteases corresponding to amino acid positions 123-126 and 128 of wild type FMDV 3C protease include D123, V124, G125, R126 and 1128, respectively, of a wild type Aphthovirus 3C protease, such as a wild type FMDV 3C protease.

[0185] In some embodiments, the modified picornavirus 3C protease encoded by the isolated polynucleotide and/or the modified picornavirus 3C protease of the present disclosure includes one or more amino acid substitution(s) located at position(s) corresponding to amino acid positions 115-130, such as amino acid positions 127 and 128, of a wild-type FMDV 3C protease. Examples of positions in picornavirus 3C proteases corresponding to amino acid positions 124 and 127 of a wild type FMDV 3C protease include F120 and L123, respectively, of a wild type Aphthovirus 3C protease, such as a wild type Bovine rhinitis A virus 3C protease. See, e.g., FIG. 4.

[0186] In some embodiments, the modified picornavirus 3C protease encoded by the isolated polynucleotide and/or the modified picornavirus 3C protease of the present disclosure includes one or more amino acid substitutions located at position(s) corresponding to amino acid positions 115-130, such as amino acid positions 124 and 127, of a wild-type FMDV 3C protease. Examples of positions in picornavirus 3C proteases corresponding to amino acid positions 124 and 127 include V121 and L124, respectively, of a wild type Aphthovirus 3C protease, such as a wild type Bovine rhinitis B virus 3C protease. See, e.g., FIG. 4.

[0187] In some embodiments, the modified picornavirus 3C protease encoded by the isolated polynucleotide and/or the modified picornavirus 3C protease of the present disclosure includes one or more amino acid substitutions located at position(s) corresponding to amino acid positions 115-130, such as amino acid positions 125 and 127, of a wild-type FMDV 3C protease. Examples of positions in picornavirus 3C proteases corresponding to amino acid positions 125 and 127 include A 125 and T127, respectively, of a wild type Aphthovirus 3C protease, such as a wild type Equine rhinitis A 3C protease. See, e.g., FIG. 4.

[0188] In some embodiments, the modified picornavirus 3C protease encoded by the isolated polynucleotide and/or the modified picornavirus 3C protease of the present disclosure includes one or more amino acid substitutions located at position(s) corresponding to amino acid positions 115-130, such as amino acid positions 117, 119, 124 and 127, of a wild-type FADV 3C protease. Examples of amino acid positions in picornavirus 3C proteases corresponding to amino acid positions 117, 120, 124 and 127 include L102, I104, N105, M109 and M112, respectively, of a wild type Enterovirus A 3C protease, such as Human coxsackievirus A10. See, e.g., FIG. 5.

[0189] In some embodiments, the modified picornavirus 3C protease encoded by the isolated polynucleotide and/or the modified picornavirus 3C protease of the present disclosure includes one or more amino acid substitutions located at position(s) corresponding to amino acid positions 115-130, such as amino acid positions 119, 120, 121 and 124, of a wild-type FMDV 3C protease. Examples of amino acid positions in picornavirus 3C proteases corresponding to amino acid positions 119, 120, 121 and 124 include I104, N105, T106 and M109, respectively, of a wild type Enterovirus A 3C protease, such as Human enterovirus A71. See, e.g., FIG. 6.

[0190] In some embodiments, the modified picornavirus 3C protease encoded by the isolated polynucleotide and/or the modified picornavirus 3C protease of the present disclosure includes one or more amino acid substitutions located at position(s) corresponding to amino acid positions 115-130, such as amino acid positions 116, 118, 119, 120, 123, 126 and 128 of a wild-type FMDV 3C protease. Examples of amino acid positions in picornavirus 3C proteases corresponding to amino acid positions 116, 118, 119, 120, 123, 126 and 128 include L102, I104, N105, T106, F109, M112 and I114, respectively, of a wild type Enterovirus B 3C protease, such as Human coxsackievirus B. See, e.g., FIG. 7.

[0191] In some embodiments, the modified picornavirus 3C protease encoded by the isolated polynucleotide and/or the modified picomavirus 3C protease of the present disclosure includes one or more amino acid substitutions located at position(s) corresponding to amino acid positions 115-130, such as amino acid positions 117, 119, 120, 124 and 127 of a wild-type FMDV 3C protease. Examples of amino acid positions in picornavirus 3C proteases corresponding to amino acid positions 117, 119, 120, 124 and 127 include L1102, V104, N105, T106, F109 and M112 respectively, of a wild type Enterovirus C 3C protease, such as Human coxsackievirus A1. See, e.g., FIG. 5.

[0192] In some embodiments, the modified picornavirus 3C protease encoded by the isolated polynucleotide and/or the modified picornavirus 3C protease of the present disclosure includes one or more amino acid substitutions located at position(s) corresponding to amino acid positions 115-130, such as amino acid positions 117, 118 and 119 of a wild-type FMDV 3C protease. Examples of amino acid positions in picornavirus 3C proteases corresponding to amino acid positions 117, 118 and 119 include L102, I103, and V104, respectively, of a wild type Enterovirus C 3C protease, such as Human poliovirus. See, e.g., FIG. 8.

[0193] In some embodiments, the modified picornavirus 3C protease encoded by the isolated polynucleotide and/or the modified picornavirus 3C protease of the present disclosure includes one or more amino acid substitutions located at position(s) corresponding to amino acid positions 115-130, such as amino acid positions 116, 118, 122, 126 and 128, of a wild-type FMDV 3C protease. Examples of positions in picornavirus 3C proteases corresponding to amino acid positions 116, 118, 122, 126 and 128 include L102, L104, Q108, T112 and I114, respectively, of a wild type Rhinovirus A 3C protease. See, e.g., FIG. 9.

[0194] In some embodiments, the modified picornavirus 3C protease encoded by the isolated polynucleotide and/or the modified picornavirus 3C protease of the present disclosure includes one or more amino acid substitutions located at position(s) corresponding to amino acid positions 115-130, such as amino acid positions 125 and 127 of a wild-type FMDV 3C protease. Examples of amino acid positions in picomavirus 3C proteases corresponding to amino acid positions 128 and 130 include I112 and E114, respectively, of a wild type E Rhinovirus B 3C protease. See, e.g., FIG. 10.

[0195] In some embodiments, the modified picornavirus 3C protease encoded by the isolated polynucleotide and/or the modified picornavirus 3C protease of the present disclosure includes one or more amino acid substitutions located at position(s) corresponding to amino acid positions 115-130, such as amino acid positions 115, 117, 124 and 128 of a wild-type FMDV 3C protease. Examples of amino acid positions in picornavirus 3C proteases corresponding to amino acid positions 115, 117, 124 and 128 include L119, T121, M128 and I130, respectively, of a wild type Hepatitis A virus 3C protease. See, e.g., FIG. 11.

[0196] In some embodiments, the modified picornavirus 3C protease encoded by the isolated polynucleotide and/or the modified picornavirus 3C protease of the present disclosure includes one or more amino acid substitutions located at position(s) corresponding to amino acid positions 99 and 100 of a wild-type FMDV 3C protease. Examples of positions in picornavirus 3C proteases corresponding to position 99 includes 199 and L99 of a wild type Aphthovirus 3C protease, such as a wild type FMDV 3C protease. Examples of positions in picornavirus 3C proteases corresponding to position 100 includes T100 of a wild type Aphthovirus 3C protease, such as a wild type FMDV 3C protease. See, e.g., FIG. 4 and FIG. 12.

[0197] In some embodiments, the modified picornavirus 3C protease encoded by the isolated polynucleotide and/or the modified picornavirus 3C protease of the present disclosure includes one or more amino acid substitutions located at position(s) corresponding to amino acid positions 99 and 100, such as amino acid position 100, of a wild-type FMDV 3C protease. Examples of positions in picornavirus 3C proteases corresponding to position 100 includes T96 of a wild type Aphihovirus 3C protease, such as a wild type Bovine rhinitis A virus 3C protease. T97 of a wild type Aphthovirus 3C protease, such as a wild type Bovine rhinitis A virus 3C protease and V100 of a wild type Aphthovirus 3C protease, such as a wild type Equine rhinitis A virus 3C protease. See, e.g., FIG. 4 and FIG. 12.

[0198] In other embodiments, positions corresponding to amino acid position 100 of a wild-type FMDV 3C protease includes, for example, T87 of a wild type Enterovirus A 3C protease, such as a wild type Human coxsackievirus A10 3C protease and a wild type Human enterovirus A71 3C protease. See, e.g., FIG. 5, FIG. 6 and FIG. 12.

[0199] In other embodiments, positions corresponding to amino acid position 100 of a wild-type FMDV 3C protease includes, for example, R87 of a wild type Enterovirus B 3C protease, such as a wild type Human coxsackievirus B1 or B3 3C protease. See, e.g., FIG. 12.

[0200] In other embodiments, positions corresponding to amino acid position 100 of a wild-type FMDV 3C protease include, for example, R87 of a wild type Enterovirus C 3C protease, such as a wild type coxsackievirus A1 3C protease and a wild type Human poliovirus 3C protease. See, e.g., FIG. 5, FIG. 8 and FIG. 12.

[0201] In other embodiments, positions corresponding to amino acid positions 99 and 100 of a wild-type FMDV 3C protease includes, for example, 186 and R87, respectively, of a wild type RhinovirusA 3C protease. See, e.g., FIG. 9 and FIG. 12.

[0202] In other embodiments, positions corresponding to amino acid position 99 and 100 of a wild-type FMDV 3C protease includes, for example, 186 and R87, respectively, of a wild type Rhinovirus B 3C protease. See, e.g., FIG. 10 and FIG. 12.

[0203] In other embodiments, positions corresponding to amino acid position 100 of a wild-type FMDV 3C protease includes, for example, T100 of a wild type Hepatitis A virus 3C protease. See, e.g., FIG. 11 and FIG. 12.

[0204] Exemplary Positions of Amino Acid Substitutions

[0205] In some aspects, the present disclosure is directed to an isolated polynucleotide encoding a modified picornavirus 3C protease, such as a wild type Aphthovirus 3C protease, such as a wild type FMDC 3C protease, wherein the modified picornavirus 3C protease comprises one or more amino acid substitutions at positions I22 and L23. In other aspects, the present disclosure is directed to a modified picornavirus 3C protease, such as a modified Aphthovirus 3C protease, such as a modified FMDC 3C protease comprising one or more amino acid substitutions located at positions I22 and L23.

[0206] In some aspects, the present disclosure is directed to an isolated polynucleotide encoding a modified picornavirus 3C protease, such as a wild type Aphthovirus 3C protease, such as a wild type Bovine rhinitis A virus 3C protease, wherein the modified picornavirus 3C protease comprises one or more amino acid substitutions at positions V22 and C23. In other aspects, the present disclosure is directed to a modified picornavirus 3C protease, such as a modified Aphthovirus 3C protease, such as a modified Bovine rhinitis A virus 3C protease comprising the one or more amino acid substitutions located at positions V22 and C23.

[0207] In some aspects, the present disclosure is directed to an isolated polynucleotide encoding a modified picornavirus 3C protease, such as a wild type Aphthovirus 3C protease, such as a wild type Bovine rhinitis B virus 3C protease, wherein the modified picornavirus 3C protease comprises one or more amino acid substitutions at Y22 and R23. In other aspects, the present disclosure is directed to a modified picornavirus 3C protease, such as a modified Aphthovirus 3C protease, such as a modified Bovine rhinitis B virus 3C protease comprising the one or more amino acid substitutions located at positions Y22 and R23.

[0208] In some aspects, the present disclosure is directed to an isolated polynucleotide encoding a modified picornavirus 3C protease, such as a wild type Aphthovirus 3C protease, such as a wild type Equine rhinitis A virus 3C protease, wherein the modified picornavirus 3C protease comprises one or more amino acid substitutions at positions Y22 and C23. In other aspects, the present disclosure is directed to a modified picornavirus 3C protease, such as a modified Aphthovirus 3C protease, such as a modified Equine rhinitis A virus 3C protease comprising the one or more amino acid substitutions located at positions Y22 and C23.

[0209] In some aspects, the present disclosure is directed to an isolated polynucleotide encoding a modified picornavirus 3C protease, such as a wild type Enterovirus A 3C protease, such as a wild type Human coxsackievirus A10 3C protease, wherein the modified picornavirus 3C protease comprises one or more amino acid substitutions at positions Q19 and T20. In other aspects, the present disclosure is directed to a modified picornavirus 3C protease, such as a modified Enterovirus A 3C protease, such as a modified Human coxsackievirus A10 3C protease comprising the one or more amino acid substitutions located at positions Q19 and T20.

[0210] In some aspects, the present disclosure is directed to an isolated polynucleotide encoding a modified picornavirus 3C protease, such as a wild type Enterovirus A 3C protease, such as a wild type Human enterovirus A71 3C protease, wherein the modified picornavirus 3C protease comprises one or more amino acid substitutions at positions Q19 and T20. In other aspects, the present disclosure is directed to a modified picornavirus 3C protease, such as a modified Enterovirus A 3C protease, such as a modified Human enterovirus A71 3C protease comprising the one or more amino acid substitutions located at positions Q19 and T20.

[0211] In some aspects, the present disclosure is directed to an isolated polynucleotide encoding a modified picornavirus 3C protease, such as a wild type Enterovirus B 3C protease, such as a wild type Human coxsackievirus B1 and/or B3 3C protease, wherein the modified picornavirus 3C protease comprises one or more amino acid substitutions at positions K19 and T20. In other aspects, the present disclosure is directed to a modified picornavirus 3C protease, such as a modified Enterovirus B protease, such as a modified Human coxsackievirus B1 and/or B3 3C protease comprising the one or more amino acid substitutions located at positions K19 and T20.

[0212] In some aspects, the present disclosure is directed to an isolated polynucleotide encoding a modified picornavirus 3C protease, such as an Enterovirus C 3C protease, such as a wild type Human coxsackievirus A1 3C protease and/or a wild type Human poliovirus 3C protease, wherein the modified picornavirus 3C protease comprises one or more amino acid substitutions at positions T19 and T20. In other aspects, the present disclosure is directed to a modified picornavirus 3C protease, such as a modified Enterovirus C 3C protease, such as a modified Human coxsackievirus A1 3C protease and/or a modified Human poliovirus 3C protease comprising the one or more amino acid substitutions located at positions T19 and T20.

[0213] In some aspects, the present disclosure is directed to an isolated polynucleotide encoding a modified picornavirus 3C protease, such as a wild type Rhinovirus A 3C protease, wherein the modified picornavirus 3C protease comprises one or more amino acid substitutions at positions T19 and T20. In other aspects, the present disclosure is directed to a modified picornavirus 3C protease, such as a modified Rhinovirus A 3C protease comprising the one or more amino acid substitutions located at positions T19 and T20.

[0214] In some aspects, the present disclosure is directed to an isolated polynucleotide encoding a modified picornavirus 3C protease, such as a wild type Rhinovirus B 3C protease, wherein the modified picornavirus 3C protease comprises one or more amino acid substitutions at positions T19 and T20. In other aspects, the present disclosure is directed to a modified picornavirus 3C protease, such as a modified Rhinovirus B 3C protease comprising the one or more amino acid substitutions located at positions T19 and T20.

[0215] In some aspects, the present disclosure is directed to an isolated polynucleotide encoding a modified picornavirus 3C protease, such as a wild type Hepatitis A virus 3C protease, wherein the modified picornavirus 3C protease comprises one or more amino acid substitutions at positions G19 and T20. In other aspects, the present disclosure is directed to a modified picornavirus 3C protease, such as a modified Hepatitis A virus 3C protease comprising the one or more amino acid substitutions located at positions G19 and G20.

[0216] In some aspects, the present disclosure is directed to an isolated polynucleotide encoding a modified picornavirus 3C protease, such as a wild type Aphthovirus 3C protease, such as a wild type FMDC 3C protease, wherein the modified picornavirus 3C protease comprises one or more amino acid substitutions at positions D123, V124, G125, R126 and 1128. In other aspects, the present disclosure is directed to a modified picornavirus 3C protease, such as a modified Aphthovirus 3C protease, such as a modified FMDC 3C protease comprising the one or more amino acid substitutions located at positions D123, V124, G125, R126 and 1128.

[0217] In some aspects, the present disclosure is directed to an isolated polynucleotide encoding a modified picornavirus 3C protease, such as a wild type Aphthovirus 3C protease, such as a wild type Bovine rhinitis A virus 3C protease, wherein the modified picornavirus 3C protease comprises one or more amino acid substitutions at positions F120 and L123. In other aspects, the present disclosure is directed to a modified picornavirus 3C protease, such as a modified Aphthovirus 3C protease, such as a modified Bovine rhinitis A virus 3C protease comprising the one or more amino acid substitutions located at positions F120 and L123.

[0218] In some aspects, the present disclosure is directed to an isolated polynucleotide encoding a modified picornavirus 3C protease, such as a wild type Aphthovirus 3C protease, such as a wild type Bovine rhinitis B virus 3C protease, wherein the modified picornavirus 3C protease comprises one or more amino acid substitutions at positions V121 and L124. In other aspects, the present disclosure is directed to a modified picornavirus 3C protease, such as a modified Aphthovirus 3C protease, such as a modified Bovine rhinitis B virus 3C protease comprising the one or more amino acid substitutions located at positions V121 and L124.

[0219] In some aspects, the present disclosure is directed to an isolated polynucleotide encoding a modified picornavirus 3C protease, such as a wild type Aphthovirus 3C protease, such as a wild type Equine rhinitis A virus 3C protease, wherein the modified picornavirus 3C protease comprises one or more amino acid substitutions at positions A125 and T127. In other aspects, the present disclosure is directed to a modified picornavirus 3C protease, such as a modified Aphthovirus 3C protease, such as a modified Equine rhinitis A virus 3C protease comprising the one or more amino acid substitutions located at positions A125 and T127.

[0220] In some aspects, the present disclosure is directed to an isolated polynucleotide encoding a modified picornavirus 3C protease, such as a wild type Enterovirus A 3C protease, such as a wild type Human coxsackievirus A10 3C protease, wherein the modified picornavirus 3C protease comprises one or more amino acid substitutions at positions L102, I104, N105, M109 and M112. In other aspects, the present disclosure is directed to a modified picornavirus 3C protease, such as a modified Enterovirus A 3C protease, such as a modified Human coxsackievirus A10 3C protease comprising the one or more amino acid substitutions located at positions L102, I104, N105, M109 and M112.

[0221] In some aspects, the present disclosure is directed to an isolated polynucleotide encoding a modified picornavirus 3C protease, such as a wild type Enterovirus A 3C protease, such as a wild type Human enterovirus A71 3C protease, wherein the modified picornavirus 3C protease comprises one or more amino acid substitutions at positions I104, N105, T106 and M109. In other aspects, the present disclosure is directed to a modified picornavirus 3C protease, such as a modified Enterovirus A 3C protease, such as a modified Human enterovirus A71 3C protease comprising the one or more amino acid substitutions located at positions I104, N105, T106 and M109.

[0222] In some aspects, the present disclosure is directed to an isolated polynucleotide encoding a modified picornavirus 3C protease, such as a wild type Enterovirus B 3C protease, such as a wild type Human coxsackievirus B1 and/or B3 3C protease, wherein the modified picornavirus 3C protease comprises one or more amino acid substitutions at positions L102, I104, N105, T106, F109, M112 and I114. In other aspects, the present disclosure is directed to a modified picornavirus 3C protease, such as a modified Enterovirus B protease, such as a modified Human coxsackievirus B1 and/or B3 3C protease comprising the one or more amino acid substitutions located at positions L102, I104, N105, T106, F109, M112 and I114.

[0223] In some aspects, the present disclosure is directed to an isolated polynucleotide encoding a modified picornavirus 3C protease, such as an Enterovirus C 3C protease, such as a wild type Human coxsackievirus A1 3C protease, wherein the modified picornavirus 3C protease comprises one or more amino acid substitutions at positions L102, V104, N105, T106, F109 and M112. In other aspects, the present disclosure is directed to a modified picornavirus 3C protease, such as a modified Enterovirus C 3C protease, such as a modified Human coxsackievirus A1 3C protease comprising the one or more amino acid substitutions located at positions L102, V104, N105, T106, F109 and M112.

[0224] In some aspects, the present disclosure is directed to an isolated polynucleotide encoding a modified picornavirus 3C protease, such as an Enterovirus C 3C protease, such as a wild type Human poliovirus 3C protease, wherein the modified picornavirus 3C protease comprises one or more amino acid substitutions at positions L102, I103, and V104. In other aspects, the present disclosure is directed to a modified picornavirus 3C protease, such as a modified Enterovirus C 3C protease, such as a modified Human poliovirus 3C protease comprising the one or more amino acid substitutions located at positions L102, I103, and V104.

[0225] In some aspects, the present disclosure is directed to an isolated polynucleotide encoding a modified picornavirus 3C protease, such as a wild type Rhinovirus A 3C protease, wherein the modified picornavirus 3C protease comprises one or more amino acid substitutions at positions L102, L104, Q108, T112 and I114. In other aspects, the present disclosure is directed to a modified picornavirus 3C protease, such as a modified RhinovirusA 3C protease comprising the one or more amino acid substitutions located at positions L102, L104, Q108, T112 and I114.

[0226] In some aspects, the present disclosure is directed to an isolated polynucleotide encoding a modified picornavirus 3C protease, such as a wild type Rhinovirus B 3C protease, wherein the modified picornavirus 3C protease comprises one or more amino acid substitutions at positions I1112 and E114. In other aspects, the present disclosure is directed to a modified picornavirus 3C protease, such as a modified Rhinovirus B 3C protease comprising the one or more amino acid substitutions located at positions I112 and E114.

[0227] In some aspects, the present disclosure is directed to an isolated polynucleotide encoding a modified picornavirus 3C protease, such as a wild type Hepatitis A virus 3C protease, wherein the modified picornavirus 3C protease comprises one or more amino acid substitutions at positions L119, T121, M128 and I130. In other aspects, the present disclosure is directed to a modified picornavirus 3C protease, such as a modified Hepatitis A virus 3C protease comprising the one or more amino acid substitutions located at positions L119, T121, M128 and I130.

[0228] In some aspects, the present disclosure is directed to an isolated polynucleotide encoding a modified picornavirus 3C protease, such as a wild type Aphthovirus 3C protease, such as a wild type FMDC 3C protease, wherein the modified picornavirus 3C protease comprises one or more amino acid substitutions at positions I99, L99 and T100. In other aspects, the present disclosure is directed to a modified picornavirus 3C protease, such as a modified Aphthovirus 3C protease, such as a modified FMDC 3C protease comprising the one or more amino acid substitutions located at positions I99, L99 and T100.

[0229] In some aspects, the present disclosure is directed to an isolated polynucleotide encoding a modified picornavirus 3C protease, such as a wild type Aphthovirus 3C protease, such as a wild type Bovine rhinitis A virus 3C protease, wherein the modified picornavirus 3C protease comprises one or more amino acid substitutions at position T96. In other aspects, the present disclosure is directed to a modified picornavirus 3C protease, such as a modified Aphthovirus 3C protease, such as a modified Bovine rhinitis A virus 3C protease comprising the one or more amino acid substitutions located at position T96.

[0230] In some aspects, the present disclosure is directed to an isolated polynucleotide encoding a modified picornavirus 3C protease, such as a wild type Aphthovirus 3C protease, such as a wild type Bovine rhinitis B virus 3C protease, wherein the modified picornavirus 3C protease comprises one or more amino acid substitutions at position T97. In other aspects, the present disclosure is directed to a modified picornavirus 3C protease, such as a modified Aphthovirus 3C protease, such as a modified Bovine rhinitis B virus 3C protease comprising the one or more amino acid substitutions located at position T97.

[0231] In some aspects, the present disclosure is directed to an isolated polynucleotide encoding a modified picornavirus 3C protease, such as a wild type Aphthovirus 3C protease, such as a wild type Equine rhinitis A virus 3C protease, wherein the modified picornavirus 3C protease comprises one or more amino acid substitutions at position V100. In other aspects, the present disclosure is directed to a modified picornavirus 3C protease, such as a modified Aphthovirus 3C protease, such as a modified Equine rhinitis A virus 3C protease comprising the one or more amino acid substitutions located at position V100.

[0232] In some aspects, the present disclosure is directed to an isolated polynucleotide encoding a modified picornavirus 3C protease, such as a wild type Enterovirus A 3C protease, such as a wild type Human coxsackievirus A10 3C protease, wherein the modified picornavirus 3C protease comprises one or more amino acid substitutions at position T87. In other aspects, the present disclosure is directed to a modified picornavirus 3C protease, such as a modified Enterovirus A 3C protease, such as a modified Human coxsackievirus A10 3C protease comprising the one or more amino acid substitutions located at position T87.

[0233] In some aspects, the present disclosure is directed to an isolated polynucleotide encoding a modified picornavirus 3C protease, such as a wild type Enterovirus A 3C protease, such as a wild type Human enterovirus A71 3C protease, wherein the modified picornavirus 3C protease comprises one or more amino acid substitutions at position T87. In other aspects, the present disclosure is directed to a modified picornavirus 3C protease, such as a modified Enterovirus A 3C protease, such as a modified Human enterovirus A71 3C protease comprising the one or more amino acid substitutions located at position T87.

[0234] In some aspects, the present disclosure is directed to an isolated polynucleotide encoding a modified picornavirus 3C protease, such as a wild type Enterovirus B 3C protease, such as a wild type Human coxsackievirus B1 and/or B3 3C protease, wherein the modified picornavirus 3C protease comprises one or more amino acid substitutions at position R87. In other aspects, the present disclosure is directed to a modified picornavirus 3C protease, such as a modified Enterovirus B protease, such as a modified Human coxsackievirus B1 and/or B3 3C protease comprising the one or more amino acid substitutions located at position R87.

[0235] In some aspects, the present disclosure is directed to an isolated polynucleotide encoding a modified picornavirus 3C protease, such as an Enterovirus C 3C protease, such as a wild type Human coxsackievirus A1 3C protease, wherein the modified picomavirus 3C protease comprises one or more amino acid substitutions at position R87. In other aspects, the present disclosure is directed to a modified picornavirus 3C protease, such as a modified Enterovirus C 3C protease, such as a modified Human coxsackievirus A1 3C protease comprising the one or more amino acid substitutions located at position R87.

[0236] In some aspects, the present disclosure is directed to an isolated polynucleotide encoding a modified picornavirus 3C protease, such as an Enterovirus C 3C protease, such as a wild type Human poliovirus 3C protease, wherein the modified picornavirus 3C protease comprises one or more amino acid substitutions at position R87. In other aspects, the present disclosure is directed to a modified picomavirus 3C protease, such as a modified Enterovirus C 3C protease, such as a modified Human poliovirus 3C protease comprising the one or more amino acid substitutions located at position R87.

[0237] In some aspects, the present disclosure is directed to an isolated polynucleotide encoding a modified picornavirus 3C protease, such as a wild type Rhinovirus A 3C protease, wherein the modified picornavirus 3C protease comprises one or more amino acid substitutions at positions I86 and R87 and I114. In other aspects, the present disclosure is directed to a modified picomavirus 3C protease, such as a modified Rhinovirus A 3C protease comprising the one or more amino acid substitutions located at positions I86, R87 and I114.

[0238] In some aspects, the present disclosure is directed to an isolated polynucleotide encoding a modified picornavirus 3C protease, such as a wild type Rhinovirus B 3C protease, wherein the modified picornavirus 3C protease comprises one or more amino acid substitutions at positions I86 and R87. In other aspects, the present disclosure is directed to a modified picomavirus 3C protease, such as a modified Rhinovirus B 3C protease comprising the one or more amino acid substitutions located at positions I86 and R87.

[0239] In some aspects, the present disclosure is directed to an isolated polynucleotide encoding a modified picornavirus 3C protease, such as a wild type Hepatitis A virus 3C protease, wherein the modified picornavirus 3C protease comprises one or more amino acid substitutions at position T100. In other aspects, the present disclosure is directed to a modified picornavirus 3C protease, such as a modified Hepatitis A virus 3C protease comprising the one or more amino acid substitutions located at position T100.

[0240] Amino Acid Substitutions

[0241] Mutations resulting in the amino acid substitutions described herein may be introduced into a parent picornavirus 3C protease, such as the wild type picornavirus 3C proteases described herein or an isolated polynucleotide encoding a picornavirus 3C protease described herein, using any methodology known to those skilled in the art. Mutations may be introduced randomly, for example, by conducting a PCR reaction in the presence of manganese as a divalent metal ion cofactor. In other embodiments, oligonucleotide directed mutagenesis may be used to create the polynucleotides encoding for the modified picornavirus 3C proteases of the present disclosure, which allows for all possible classes of base pair changes at any determined site along an encoding DNA molecule. In general, this technique involves annealing an oligonucleotide complementary (except for one or more mismatches) to a single stranded nucleotide sequence coding for the parent picornavirus 3C protease of interest. The mismatched oligonucleotide is then extended by DNA polymerase, generating a double-stranded DNA molecule containing the desired amino acid substitution in sequence in one strand. The double-stranded polynucleotide can then be inserted into an appropriate expression vector, and a mutant or modified polypeptide can thus be produced. The above-described oligonucleotide directed mutagenesis or site directed mutagenesis can, optionally, be carried out via PCR.

[0242] The amino acid substitution may include any of arginine, alanine, asparagine, aspartic acid, cysteine, glutamine, glutamic acid, glycine, histidine, isoleucine, leucine, lysine, methionine, phenylalanine, proline, serine, threonine, tryptophan, tyrosine, valine, or an unnatural amino acid. For example, R87 in the 3C protease from wild type Rhinovirus B 3C protease may be replaced with an alanine, an asparagine, an aspartic acid, a cysteine, a glutamine, a glutamic acid, a glycine, a histidine, an isoleucine, a leucine, a lysine, a methionine, a phenylalanine, a proline, a serine, a threonine, tryptophan, a valine, or an unnatural amino acid.

[0243] In some embodiments, the one or more amino acid substitutions comprise one or more non-conservative substitutions. A non-conservative amino acid substitution refers to replacing an amino acid with another amino acid that has different chemical properties (such as, for example, a polarity, hydrogen bonding potential, acidic, basic, shape, hydrophobic, aromatic, and the like). Examples include replacing a hydrophobic, non-polar amino acid such as Ala, Val, Leu, Ile, Pro, Phe, Trp or Met with a hydrophilic, polar amino acid, such as Ser, Thr, Cys, Tyr, Asn or Gin, or an acidic, negatively charged amino acid such as Asp or Glu with a basic, positively charged amino acid, such as Lys, Arg or His. Other examples of non-conservative substitution include replacing amino acids between the following groups in Table 1, below.

TABLE 1
Amino Acid Side Chain Characteristics

| Side Chain Characteristic | Amino Acid |
|---|---|
| Non-polar (hydrophobic) | |
| Aliphatic | Ala, Leu, Ile, Val, Pro |
| Aromatic | Phe Trp |
| Sulfur containing | Met |
| Borderline | Gly |
| Uncharged Polar | |
| Hydroxyl | Ser Thr Tyr |
| Amides | Asn Gln |
| Sulfhydryl | Cys |
| Borderline | Gly |
| Charged | Arg Lys Asp Glu |

[0244] In some embodiments, the one or more amino acid substitutions includes proline. As is known to an ordinary artisan, proline typically acts as a structural disrupter of secondary structure elements including alpha helices and beta sheets.

[0245] In some embodiments, the modified picornavirus 3C protease encoded by the isolated polynucleotide described herein and the present modified picornavirus 3C protease contains 1-27 such as 1-19 amino acid substitutions, for example 1-10, 1-8, 1-6 or 1-5 amino acid substitutions, such as 1-4 or 1-3 amino acid substitutions, such as 1 or 2 amino acid substitutions.

[0246] In some embodiments, the one or more amino acid substitution(s) does not alter the protein conformation and/or functional properties of the present modified picornavirus 3C proteases. More typically, however, the one or more amino acid substitution(s) alters the conformation and/or functional properties of the present modified 3C proteases. Typically, both the conformation and one or more functional property of the present 3C proteases are modified in comparison to that of a control 3C protease.

[0247] In some embodiments, the one or more amino acid substitution(s) described herein alters a secondary structure such as an alpha helix, a beta sheet, a beta strand, or a loop. Alteration of secondary structure may be determined using well known protein secondary structure prediction programs including SPIDER2, Heffernan et al., “Highly Accurate Sequence-based Prediction of Half-Sphere Exposures of Amino Acid Residues in Proteins”, Bioinformatics 2016. 32: 843-849 and PSIPRED Jones D T. “Protein secondary structure prediction based on position-specific scoring matrices”, J. Mol. Biol., 9, 292: 195-202, which is herein incorporated by reference in its entirety.

[0248] In some embodiments, the instant modified picornavirus 3C protease includes one or more point mutations to a nucleotide sequence encoding a picornavirus 3C protease that would result in one or more amino acid substitutions in the translated amino acid sequence, specifically one or more point mutations targeting one or more of an A₁-B₁ β sheet, an A₂-B₂ β sheet and/or a loop between an F₁ β strand and an A₂ β strand, or an A₁, A₂, B₁ and/or B₂ β strand.

[0249] In some embodiments, the one or more amino acid substitutions that alter(s), e.g., disrupts, the A₁-B₁ β sheet is/are located at position(s) corresponding to one or more of amino acid positions 16-25 of a wild type FMDV 3C protease.

[0250] In some embodiments, the one or more amino acid substitutions that alter(s), e.g., disrupts, the A₁-B₁ β sheet alter(s), e.g., disrupts the A₁ β sheet. Typically, the one or more amino acid substitutions that alter(s), e.g., disrupts the A₁ β sheet is/are located at position(s) corresponding to one or more of amino acid positions 20-23 of a wild type FMDV 3C protease.

[0251] In some embodiments, the one or more amino acid substitutions that alter(s), e.g., disrupts, the A₁-B₁ β sheet alter(s), e.g., disrupts a loop between an A₁ β strand and a B₁ β strand. Typically, the one or more amino acid substitutions that alter(s), e.g., disrupts the loop between an A₁ β strand and a B₁ β strand is/are located at position(s) corresponding to one or more of amino acid positions 24 and 25 of a wild type FMDV 3C protease.

[0252] In some embodiments, the one or more substitutions that alter(s), e.g., disrupts, the loop between the F₁ β strand and the A₂ β strand is/are located at position(s) corresponding to one or more of amino acid positions 99 and 100 of a wild type FMDV 3C protease.

[0253] In some embodiments, the one or more substitutions that alter(s), e.g., disrupts, the A₂-B₂ β sheet is/are located at position(s) corresponding to one or more of amino acid positions 115-130 of a wild type FMDV 3C protease.

[0254] In some embodiments, the one or more amino acid substitutions alters, e.g., disrupts, the B₂ β strand of the A₂-B₂ β sheet. In some embodiments, the B₂ β strand includes residues 123 to 128 of a picornavirus 3C protease, such as an FMDV 3C protease. In some embodiments, the one or more substitutions that alter(s), e.g., disrupts, the B₂ β strand of the A₂-B₂ β sheet is/are located at position(s) corresponding to one or more of amino acid positions 123 to 128 of a wild type FMDV 3C protease.

[0255] In some embodiments, the one or more amino acid substitutions disrupts the B₂′ β strand. The B₂′ β strand corresponds to residues 130 to 133 in species within the Apthovirus genus including Bovine rhinitis A virus, Bovine rhinitis B virus, Equine rhinitis A virus and FMDV. In some embodiments, such as species including Rhinovirus A, Rhinovirus B, and Hepatitis A, the B′₂ β strand is absent. For example, the B₂ β strand of the A₂-B₂ β sheet corresponds to residues 103 to 116 (Rhinovirus A) and residues 100 to 114 (Rhinovirus B), which are homologous to residues 117 to 130 in FMDV. In some embodiments, such as a 3C protease from Hepatitis A virus, the B₂ β strand of the A₂-B₂ β sheet corresponds to residues 121 to 132, which are homologous to residues 120 to 132 in FMDV Accordingly, in some embodiments, the one or more substitutions that alter(s), e.g., disrupts, the A₂-B₂ β sheet is/are located at position(s) corresponding to one or more of amino acid positions 117 to 130 of a wild type FMDV 3C protease. In other embodiments, the one or more substitutions that alter(s), e.g., disrupts, the A₂-B₂ β sheet is/are located at position(s) corresponding to one or more of amino acid positions 120 to 132 of a wild type FMDV 3C protease, such as amino acid positions 120 to 130.

[0256] In some embodiments, alteration, e.g., disruption, of a secondary structure, such as an A₁-B₁ β sheet, an A₂-B₂ β sheet and/or a loop between an F₁ β strand and an A₂ β strand, is associated with a change in a functional property in comparison to that of a control 3C protease. For example, in some embodiments, the modified picornavirus 3C protease encoded by an isolated polynucleotide of the present disclosure is capable of reduced toxicity when expressed in a host cell and/or enhanced transgene expression of a polypeptide, such as a P1 precursor polypeptide, in comparison to that of a control 3C protease. In some embodiments, the proteolytic processing ability of the modified picornavirus 3C proteases of the present disclosure is reduced in comparison to that of a control 3C protease.

[0257] During picomavirus proteolytic processing, a single polypeptide precursor, which may be translated from a single open reading frame of a picornavirus RNA genome, is cleaved into functional proteins by virally encoded proteases including wild type picornavirus 3C proteases. Typically, cleavage take place at different stages as shown in FIG. 2, forming multiple intermediate polypeptide precursors including P1, P2 and P3, which are further cleaved to form structural proteins VP1, VP2, VP3 and VP4, as well as non-structural proteins L, 2A, 2B, 2C, 3A, 3B1, 3B2, 3B., 3C and 3D.

[0258] P1 is typically cleaved during assembly of a mature virus by a wild type picomavirus 3C protease to yield VP0 VP1 and VP3, which self-assemble to form a roughly spherical protein shell (capsid). Typically, auto-catalytic cleavage of VP0 into VP2 and VP4 occurs during encapsidation of the viral genome to produce a mature virus. The capsid generally serves to protect the genome while the virus is outside of cells and also allows it to bind and subsequently gain entry to cells through interaction with specific cell-surface receptors (e.g., certain integrins). The virus capsid may be composed of numerous copies, e.g., 60 copies, of each of VP1, VP2, VP3 and VP4.

[0259] The proteolytic activity of the modified picornavirus 3C protease encoded by an isolated polynucleotide of the present disclosure and/or the present modified picornavirus 3C proteases may be greater or less than that of a control 3C protease. In some embodiments, the proteolytic activity of the present modified picornavirus 3C protease exhibits 10, 20, 30, 40, 50, 60, 70, 80, 90, 100, 110, 120, 130, 140, 150 or 200% of the proteolytic activity of a control picornavirus 3C protease. This activity may be determined based on the relative ability of the modified picornavirus 3C protease to perform one or more cleavages of P1, such as those producing VP0, VP1 and VP3 viral proteins, or in some embodiments, VP1, VP2, VP3 and VP4. In one non-limiting example, the modified picornavirus 3C protease exhibits at least 90% of the ability to cleave P1 compared to that of a control picornavirus 3C protease, such as its closest natural counterpart.

[0260] In further embodiments, a modified picomavirus 3C protease encoded by an isolated polynucleotide of the present disclosure or a modified picornavirus 3C protease as disclosed herein has the ability to process at least 900 of the total amount of a picornavirus P1 polypeptide precursor expressed in a host cell, such as at least 95%, or such as at least 99%, or such as at least 99.90%, e.g., 99.9-100.0% in comparison to that of a control picornavirus 3C protease.

[0261] Typically and advantageously, the instant modified picornavirus 3C protease encoded by an isolated polynucleotide of the present disclosure and/or the modified picomavirus 3C protease described herein retains its ability to fully process and to cleave a picomavirus P1 polypeptide precursor into individual capsid proteins VP1, VP2 VP3 and VP4 or VP0, VP1 and VP3 to allow subsequent assembly of these cleaved viral capsid proteins into an empty picornavirus capsid in a host cell.

[0262] In some embodiments, a modified picornavirus 3C protease encoded by an isolated polynucleotide of the present disclosure and/or the modified picornavirus 3C protease described herein has the ability to process at least 900% of a total amount of a single picornavirus polyprotein translation product including P1, P2 and P3. In some embodiments, a modified picornavirus 3C protease encoded by an isolated polynucleotide of the present disclosure and/or the modified picornavirus 3C protease described herein has the ability to process at least 90% of a total amount of a picomavirus polypeptide precursor such as P2 (or 2ABC), P3 (or 3ABCD), P1 (or 1ABCD), 1ABC, 2BC, 3AB, and 3CD. See FIG. 1. A modified picornavirus 3C protease encoded by an isolated polynucleotide of the present disclosure and/or the modified picornavirus 3C protease described herein may be used to cleave or process native sites in wild type picornavirus proteins and/or the same or similar 3C cleavage sites in non-picornavirus proteins, such as proteins engineered to include picomavirus 3C cleavage sites. In some embodiments, the picomavirus polypeptide precursors does not include a picornavirus P1 polypeptide precursor.

[0263] In some embodiments, the modified picornavirus 3C protease encoded by an isolated polynucleotide of the present disclosure and/or the modified picornavirus 3C protease reduces or eliminates the toxicity of the expressed picomavirus 3C protease towards a host cell, compared to that of a control 3C protease.

[0264] For example, the growth rate of a host cell or the yield of at least one protein encoded and expressed in a transformed host cell will be increased by at least 1, 2, 3, 4, 5, 10, 20, 30, 40, 50, 60, 70, 80, 90, 100, 150, 200, 300% or more for a host cell in which the modified picornavirus 3C protease encoded by an isolated polynucleotide of the present disclosure is expressed and/or the modified picornavirus 3C protease described herein is introduced when compared to the growth rate or the at least one protein yield of a host cell expressing a control picornavirus 3C protease.

[0265] In some embodiments, modification of a picornavirus 3C protease may increase the expression output of a transgene expression cassette and/or a recombinant expression vector containing at least a mutant nucleotide sequence encoding a modified picornavirus 3C protease of the present disclosure and a nucleotide sequence encoding a picornavirus P1 polypeptide precursor. In some non-limiting embodiments, the transgene expression output is increased by up to 20 times, such as 2-20 times, such as 5-15 times, such as 10-15 times in comparison to that of a transgene expression cassette and/or a recombinant expression vector containing a nucleotide sequence encoding a control picornavirus 3C protease and a nucleotide sequence encoding a picornavirus P1 polypeptide precursor. When a host cell is transfected with such a transgene expression cassette and/or a recombinant expression vector, the increase in the transgene expression output would translate into an increase in the production of virus-like particles (VLPs) in a host cell.

[0266] In some embodiments, the transgene expression output is assessed by fusing a luminescent reporter gene to a transgene expression cassette, such as a Gaussia luciferase gene (GLuc) or a variant thereof including, but not limited to SGLuc and then measuring the number of relative light units (RLU) utilizing an integration time of 0.5 seconds on a luminometer. In some non-limiting embodiments, a recombinant expression vector containing a transgene expression cassette or a recombinant expression vector containing at least a mutant nucleotide sequence encoding a modified picornavirus 3C protease encoded by an isolated polynucleotide of the present disclosure and a nucleotide sequence encoding a picornavirus P1 polypeptide precursor has a transgene expression output in a host cell of 10⁹-10¹⁰ RLU/0.5 s, typically 2×10⁹ to 8×10¹⁰ RLU/0.5 s, and more typically 4×10⁹ to 3×10¹⁰ RLU/0.5 s.

[0267] In yet other embodiments, the viability or passage stability of a host cell (the ability of the host cell to stably maintain and express from passage-to-passage a transgene) expressing the modified picornavirus 3C protease encoded by an isolated polynucleotide of the present disclosure may be increased by 10, 20, 30, 40, 50, 60, 70, 80, 90, 100, 150, 200% or more compared to an otherwise identical host cell expressing a control picornavirus 3C protease.

[0268] The modified picornavirus 3C protease encoded by an isolated polynucleotide of the present disclosure may exhibit less than 100, 90, 80, 70, 60, 50, 40, 30, 20 or 10% of the proteolytic activity of a control picornavirus 3C protease on one or more host cell proteins at one or more host protein target sites or on other co-expressed proteins, such as those encoded by a transgene, while retaining a significant ability to process one or more picornavirus polypeptide precursor, such as a picornavirus P1 precursor protein or one or more picornavirus polypeptide precursor excluding a picornavirus P1 precursor protein.

[0269] In some embodiments, the modified picornavirus 3C protease encoded by an isolated polynucleotide of the present disclosure exhibits less than 100, 90, 80, 70, 60, 50, 40, 30, 20 or 10%, such as no higher than 10%, proteolytic activity towards a host protein, including, but not limited to the eukaryotic translation initiation factor 4A1 (eIF4A1), histone H3, nuclear transcription factor kappa B essential modulator (NEMO), Src-associated substrate in mitosis of 68 kDa (SAM68) and eukaryotic translation initiation factor 4G (eIF4G). In some embodiments, the presence of the modified picornavirus 3C protease encoded by an isolated polynucleotide of the present disclosure exhibits less Golgi fragmentation and a reduced loss of microtubule system integrity of a host cell in comparison to an otherwise identical host cell expressing a control picornavirus 3C protease.

[0270] In some embodiments, a modified picornavirus 3C protease encoded by an isolated polynucleotide of the present disclosure will have decreased proteolytic activity toward the eIF4A1 eukaryotic initiation factor compared to an otherwise identical unmodified picornavirus 3C protease, i.e., a control picornavirus 3C protease. A modified picornavirus 3C protease encoded by an isolated polynucleotide of the present disclosure may degrade only 0.001, 0.01, 0.1, 1, 5, 10, 20, 30, 40, 50, 60, 70, 80, 90 or 95% of an eIF4A1 eukaryotic initiation factor compared to that of a control picornavirus 3C protease. In some embodiments, such decreased activity is no higher than 10% based on the total amount of eIF4A 1 expressed in a host cell, such as no higher than 8%, such as no higher than 5%, such as no higher than 1%, and such as 0.001-1.0%.

[0271] A modified picornrnavirus 3C protease encoded by an isolated polynucleotide of the present disclosure may exhibit a loss of activity towards at least one of histone H3, nuclear transcription factor kappa B essential modulator (NEMO), Src-associated substrate in mitosis of 68 kDa (SAM68) and/or eukaryotic translation initiation factor 4G (eIF4G) in comparison to that of a control picornavirus 3C protease. The modified 3C protease of the present disclosure may degrade only 0.001, 0.01, 0.1, 1, 5, 10, 20, 30, 40, 50, 60, 70, 80, 90 or 95% of at least one of histone H3, nuclear transcription factor kappa B essential modulator (NEMO), Src-associated substrate in mitosis of 68 kDa (SAM68) and/or eukaryotic translation initiation factor 4G (eIF4G) compared to an otherwise identical unmodified picornavirus 3C protease, i.e. a control picornavirus 3C protease. In further embodiments, the ability of a modified picornavirus 3C protease to induce Golgi fragmentation and loss of microtubule system integrity of a host cell is reduced or eliminated by the one or more mutations of the present disclosure in comparison to that of a control picornavirus 3C protease.

[0272] Exemplary Picornavirus Modified 3C Proteases

[0273] In some embodiments, the modified picornavirus 3C protease encoded by the isolated polynucleotide described herein and the present modified picornavirus 3C protease, such as a modified Aphthovirus 3C protease, e.g., a modified FMDV 3C protease, is at least 90%, such as at least 95%, such as at least 99% identical to a wild type FMDV 3C protease selected from among SEQ ID NO: 2 (A Turkey 2006), SEQ ID NO: 4 (A24 Cruzeiro iso71), SEQ ID NO: 6 (Asia Lebanon 89, serotype Asia 1), SEQ ID NO: 8 (Asial Shamir), SEQ ID NO: 10 (C3 Indaial), SEQ ID NO: 12 (01 PanAsia), SEQ ID NO: 14 (01 Manisa isolate 87 strain, serotype O), SEQ ID NO: 16 SAT1-20 iso11), SEQ ID NO: 18 (SAT2 Egypt 2010), and SEQ ID NO: 20 (SAT3 ZIM/6/91).

[0274] In some embodiments, the modified picornavirus 3C protease encoded by the isolated polynucleotide described herein and the present modified picornavirus 3C protease, such as a modified Aphihovirus 3C protease, e.g. a modified Bovine rhinitis 3C protease, is at least 90%, such as at least 95%, such as at least 99% identical to a wild type Bovine rhinitis 3C protease selected from among SEQ ID NO: 422 (Bovine rhinitis A Sd-1) and SEQ ID NO: 434 (Bovine rhinitis B).

[0275] In some embodiments, the modified picornavirus 3C protease encoded by the isolated polynucleotide described herein and the present modified picornavirus 3C protease, such as a modified Aphthovirus 3C protease, e.g. a modified Equine rhinitis A 3C protease, is at least 90%, such as at least 95%, such as at least 99% identical to a wild type Equine rhinitis A 3C protease of SEQ ID NO: 444.

[0276] In some embodiments, the modified picornavirus 3C protease encoded by the isolated polynucleotide described herein and the present modified picornavirus 3C protease, such as a modified Enterovirus A 3C protease, is at least 90%, such as at least 95%, such as at least 99% identical to a wild type Enterovirus A 3C protease selected from among the wild type Human coxsackievirus A10 3C protease of SEQ ID NO: 478 and the wild type Human enterovirus A71 3C protease of SEQ ID NO: 526.

[0277] In some embodiments, the modified picornavirus 3C protease encoded by the isolated polynucleotide described herein and the present modified picornavirus 3C protease, such as a modified Enterovirus B 3C protease, is at least 90%, such as at least 95%, such as at least 99% identical to a wild type Enterovirus B 3C protease selected from among the wild type Human coxsackievirus B1 3C protease of SEQ ID NO: 494 and the wild type Human coxsackievirus B3 3C protease of SEQ ID NO: 510 (Human Coxsackievirus B3 Macocy).

[0278] In some embodiments, the modified picornavirus 3C protease encoded by the isolated polynucleotide described herein and the present modified picornavirus 3C protease, such as a modified Enterovirus C 3C protease, is at least 90%, such as at least 95%, such as at least 99% identical to a wild type Enterovirus C 3C protease selected from among the wild type Human coxsackievirus A1 3C protease of SEQ ID NO: 462, (Human Coxsackievirus A1 Tompkins) and a wild type Human poliovirus 3C protease selected from among SEQ ID NO: 552 (Human Poliovirus 2 Strain R93152), SEQ ID NO: 565 (Human Poliovirus 3 Isolate CHN5275/JX/CHN/2001) and SEQ ID NO: 580 (Human Poliovirus Mahoney).

[0279] In some embodiments, the modified picornavirus 3C protease encoded by the isolated polynucleotide described herein and the present modified picornavirus 3C protease, such as a modified Rhinovirus A 3C protease, is at least 90%, such as at least 95%, such as at least 99% identical to a wild type Rhinovirus A 3C protease selected from among a wild type Human rhinovirus A 3C protease of SEQ ID NO: 604 (Human rhinovirus A20, Strain VR1130), a wild type Human rhinovirus A 3C protease of SEQ ID NO: 618 (Human rhinovirus A89, Strain VR1199) and a wild type Human rhinovirus A 3C protease of SEQ ID NO: 620 (Human rhinovirus A2).

[0280] In some embodiments, the modified picornavirus 3C protease encoded by the isolated polynucleotide described herein and the present modified picornavirus 3C protease, such as a modified Rhinovirus B 3C protease, is at least 90%, such as at least 95%, such as at least 99% identical to the wild type Rhinovirus B 3C protease of SEQ ID NO: 594 (Human rhinovirus B14).

[0281] In some embodiments, the modified picornavirus 3C protease encoded by the isolated polynucleotide described herein and the present modified picornavirus 3C protease, such as a modified Hepatovirus 3C protease, is at least 90%, such as at least 95%, such as at least 99% identical to the wild type Hepatovirus 3C protease of SEQ ID NO: 538 (Human Hepatitis A Virus).

[0282] In some embodiments, the modified picornavirus 3C protease encoded by the isolated polynucleotide described herein and the present modified picornavirus 3C protease comprises a modified FMDV 3C protease selected from among SEQ ID NO: 22 (A Turkey 2006, D123P), SEQ ID NO: 24 (A24 Cruzeiro iso71, D123P), SEQ ID NO: 26 (Asia Lebanon 89, serotype Asia 1, D123P), SEQ ID NO: 28 (Asial Shamir, D123P), SEQ ID NO: 30 (C3 Indaial, D123P), SEQ ID NO: 32 (01 PanAsia, D123P), SEQ ID NO: 34 (01 Manisa isolate 87 strain, serotype O, D123P), SEQ ID NO: 36 (SAT1-20 iso11, D123P), SEQ ID NO: 38 (SAT2 Egypt 2010, D123P) and SEQ ID NO: 40 (SAT3 ZIM/6/91, D123P).

[0283] In some embodiments, the modified picornavirus 3C protease encoded by the isolated polynucleotide described herein and the present modified picornavirus 3C protease comprises a modified FMDV 3C protease selected from among SEQ ID NO: 42 (A Turkey 2006, G125P), SEQ ID NO: 44 (A24 Cruzeiro iso71, G125P), SEQ ID NO: 46 (Asia Lebanon 89, serotype Asia 1, G125P), SEQ ID NO: 48 (Asial Shamir, G125P), SEQ ID NO: 50 (C3 Indaial, G125P), SEQ ID NO: 52 (01 PanAsia, G125P), SEQ ID NO: 54 (01 Manisa isolate 87 strain, serotype O, G125P), SEQ ID NO: 56 (SAT1-20 iso11, G125P), SEQ ID NO: 58 (SAT2 Egypt 2010, G125P) and SEQ ID NO: 60 (SAT3 ZIM/6/91, G125P).

[0284] In some embodiments, the modified picornavirus 3C protease encoded by the isolated polynucleotide described herein and the present modified picornavirus 3C protease comprises a modified FMDV 3C protease selected from among SEQ ID NO: 62 (A Turkey 2006, I128P), SEQ ID NO: 64 (A24 Cruzeiro iso71, 1128P), SEQ ID NO: 66 (Asia Lebanon 89, serotype Asia 1, G125P), SEQ ID NO: 68 (Asial Shamir, I128P), SEQ ID NO: 70 (C3 Indaial, 1128P), SEQ ID NO: 72 (01 PanAsia, G125P), SEQ ID NO: 74 (01 Manisa isolate 87 strain, serotype O, 1128P), SEQ ID NO: 76 (SAT1-20 iso11, 1128P), SEQ ID NO: 78 (SAT2 Egypt 2010, 1128P) and SEQ ID NO: 80 (SAT3 ZIM/6/91, I128P).

[0285] In some embodiments, the modified picornavirus 3C protease encoded by the isolated polynucleotide described herein and the present modified picornavirus 3C protease comprises a modified FMDV 3C protease selected from among SEQ ID NO: 82 (A Turkey 2006, I22P), SEQ ID NO: 84 (A24 Cruzeiro iso71, I22P), SEQ ID NO: 86 (Asia Lebanon 89, serotype Asia 1, I22P), SEQ ID NO: 88 (Asial Shamir, I22P), SEQ ID NO: 90 (C3 Indaial, 122P), SEQ ID NO: 92 (01 PanAsia, I22P), SEQ ID NO: 94 (01 Manisa isolate 87 strain, serotype O, I22P), SEQ ID NO: 96 (SAT1-20 iso11, 122P), SEQ ID NO: 98 (SAT2 Egypt 2010, 122P) and SEQ ID NO: 100 (SAT3 ZIM/6/91, I22P).

[0286] In some embodiments, the modified picornavirus 3C protease encoded by the isolated polynucleotide described herein and the present modified picornavirus 3C protease comprises a modified FMDV 3C protease selected from among SEQ ID NO: 102 (A Turkey 2006, 199P), SEQ ID NO: 104 (A24 Cruzeiro iso71, I99P), SEQ ID NO: 106 (Asia Lebanon 89, serotype Asia 1, 199P), SEQ ID NO: 108 (Asial Shamir, 199P), SEQ ID NO: 110 (C3 Indaial, 199P), SEQ ID NO: 112 (01 PanAsia, 199P), SEQ ID NO: 114 (01 Manisa isolate 87 strain, serotype O, 199P), SEQ ID NO: 116 (SAT2 Egypt 2010, I99P), SEQ ID NO: 178 (SAT1-20 iso11, 199P) and SEQ ID NO: 180 (SAT3 ZIM/6/91, 199P).

[0287] In some embodiments, the modified picornavirus 3C protease encoded by the isolated polynucleotide described herein and the present modified picornavirus 3C protease comprises a modified FMDV 3C protease selected from among SEQ ID NO: 138 (A Turkey 2006, L23P), SEQ ID NO: 140 (A24 Cruzeiro iso71, L23P), SEQ ID NO: 142 (Asia Lebanon 89, serotype Asia 1, L23P), SEQ ID NO: 144 (Asial Shamir, L23P), SEQ ID NO: 146 (C3 Indaial, L23P), SEQ ID NO: 148 (01 PanAsia, L23P), SEQ ID NO: 150 (O1 Manisa isolate 87 strain, serotype O, L23P), SEQ ID NO: 152 (SAT1-20 iso11, L23P), SEQ ID NO: 154 (SAT2 Egypt 2010, L23P) and SEQ ID NO: 156 (SAT3 ZIM/6/91, L23P).

[0288] In some embodiments, the modified picornavirus 3C protease encoded by the isolated polynucleotide described herein and the present modified picornavirus 3C protease comprises a modified FMDV 3C protease selected from among SEQ ID NO: 182 (A Turkey 2006, R126P), SEQ ID NO: 184 (A24 Cruzeiro iso71, R126P), SEQ ID NO: 186 (Asia Lebanon 89, serotype Asia 1, R126P), SEQ ID NO: 188 (Asial Shamir, R126P), SEQ ID NO: 190 (C3 Indaial, R126P), SEQ ID NO: 192 (01 PanAsia, R126P), SEQ ID NO: 194 (01 Manisa isolate 87 strain, serotype O, R126P), SEQ ID NO: 196 (SAT1-20 iso11, R126P), SEQ ID NO: 198 (SAT2 Egypt 2010, R126P) and SEQ ID NO: 200 (SAT3 ZIM/6/91, R126P).

[0289] In some embodiments, the modified picornavirus 3C protease encoded by the isolated polynucleotide described herein and the present modified picornavirus 3C protease comprises a modified FMDV 3C protease selected from among SEQ ID NO: 202 (A Turkey 2006, T100P), SEQ ID NO: 204 (A24 Cruzeiro iso71, T100P), SEQ ID NO: 206 (Asia Lebanon 89, serotype Asia 1, T100P), SEQ ID NO: 208 (Asial Shamir, T100P), SEQ ID NO: 210 (C3 Indaial. T100P), SEQ ID NO: 212 (01 PanAsia, T100P), SEQ ID NO: 214 (01 Manisa isolate 87 strain, serotype O, T100P), SEQ ID NO: 216 (SAT1-20 iso11, T100P), SEQ ID NO: 218 (SAT2 Egypt 2010, T100P) and SEQ ID NO: 220 (SAT3 ZIM/6/91, T100P).

[0290] In some embodiments, the modified picornavirus 3C protease encoded by the isolated polynucleotide described herein and the present modified picornavirus 3C protease comprises a modified FMDV 3C protease selected from among SEQ ID NO: 222 (A Turkey 2006, V124P), SEQ ID NO: 224 (A24 Cruzeiro iso71, V124P), SEQ ID NO: 226 (Asia Lebanon 89, serotype Asia 1, V124P), SEQ ID NO: 228 (Asial Shamir, V124P), SEQ ID NO: 230 (C3 Indaial, V124P), SEQ ID NO: 232 (01 PanAsia, V124P), SEQ ID NO: 234 (01 Manisa isolate 87 strain, serotype O, V124P), SEQ ID NO: 236 (SAT1-20 iso11, V124P), SEQ ID NO: 238 (SAT2 Egypt 2010, V124P) and SEQ ID NO: 240 (SAT3 ZIM/6/91, V124P).

[0291] In some embodiments, the modified picornavirus 3C protease encoded by the isolated polynucleotide described herein and the present modified picornavirus 3C protease comprises a modified FMDV 3C protease selected from among SEQ ID NO: 242 (A Turkey 2006, I22P/L127P), SEQ ID NO: 244 (A24 Cruzeiro iso71, 122P/L127P), SEQ ID NO: 246 (Asia Lebanon 89, serotype Asia 1, I22P/L127P), SEQ ID NO: 248 (Asial Shamir, I22P/L127P), SEQ ID NO: 250 (C3 Indaial, I122P/L127P), SEQ ID NO: 252 (01 PanAsia, 122P/L127P), SEQ ID NO: 254 (01 Manisa isolate 87 strain, serotype O, I22P/L127P), SEQ ID NO: 256 (SAT1-20 iso11, 122P/L127P), SEQ ID NO: 258 (SAT2 Egypt 2010, I22P/L127P) and SEQ ID NO: 260 (SAT3 ZIM/6/91, 122P/L127P).

[0292] In some embodiments, the modified picornavirus 3C protease encoded by the isolated polynucleotide described herein and the present modified picornavirus 3C protease comprises a modified FMDV 3C protease selected from among SEQ ID NO: 262 (A Turkey 2006, T100P/L127P), SEQ ID NO: 264 (A24 Cruzeiro iso71, T100P/L127P), SEQ ID NO: 266 (Asia Lebanon 89, serotype Asia 1, T100P/L127P), SEQ ID NO: 268 (Asial Shamir, T100P/L127P), SEQ ID NO: 270 (C3 Indaial, T100P/L127P), SEQ ID NO: 272 (01 PanAsia, T100P/L127P), SEQ ID NO: 274 (01 Manisa isolate 87 strain, serotype O, T100P/L127P), SEQ ID NO: 276 (SAT1-20 iso11, T100P/L127P), SEQ ID NO: 278 (SAT2 Egypt 2010, T100P/L127P) and SEQ ID NO: 280 (SAT3 ZIM/6/91, T100P/L127P).

[0293] In some embodiments, the modified picornavirus 3C protease encoded by the isolated polynucleotide described herein and the present modified picornavirus 3C protease comprises a modified FMDV 3C protease selected from among SEQ ID NO: 302 (A Turkey 2006, V124P/L127P), SEQ ID NO: 304 (A24 Cruzeiro iso71, V124P/L127P), SEQ ID NO: 306 (Asia Lebanon 89, serotype Asia 1, V124P/L127P), SEQ ID NO: 308 (Asial Shamir, V124P/L127P), SEQ ID NO: 310 (C3 Indaial, V124P/L127P), SEQ ID NO: 312 (01 PanAsia, V124P/L127P), SEQ ID NO: 314 (01 Manisa isolate 87 strain, serotype O, V124P/L127P), SEQ ID NO: 316 (SAT1-20 iso11, V124P/L127P), SEQ ID NO: 318 (SAT2 Egypt 2010, V124P/L127P) and SEQ ID NO: 320 (SAT3 ZIM/6/91, V124P/L127P).

[0294] In some embodiments, the modified picornavirus 3C protease encoded by the isolated polynucleotide described herein and the present modified picornavirus 3C protease comprises a modified FMDV 3C protease selected from among SEQ ID NO: 322 (A Turkey 2006, I22P/T100P/L127P), SEQ ID NO: 324 (A24 Cruzeiro iso71, I22P/T100P/L127P), SEQ ID NO: 326 (Asia Lebanon 89, serotype Asia 1, I22P/T100P/L127P), SEQ ID NO: 328 (Asial Shamir, I22P/T100P/L127P), SEQ ID NO: 330 (C3 Indaial, I22P/T100P/L127P), SEQ ID NO: 332 (01 PanAsia, I22P/T100P/L127P), SEQ ID NO: 334 (01 Manisa isolate 87 strain, serotype O, I22P/T100P/L127P), SEQ ID NO: 336 (SAT1-20 iso11, I22P/T100P/L127P), SEQ ID NO: 338 (SAT2 Egypt 2010, I22P/T100P/L127P) and SEQ ID NO: 340 (SAT3 ZIM/6/91, I22P/T100P/L127P).

[0295] In some embodiments, the modified picornavirus 3C protease encoded by the isolated polynucleotide described herein and the present modified picornavirus 3C protease comprises a modified FMDV 3C protease selected from among SEQ ID NO: 342 (A Turkey 2006, 122P/T100P/V124P), SEQ ID NO: 344 (A24 Cruzeiro iso71, I22P/T100P/V124P), SEQ ID NO: 346 (Asia Lebanon 89, serotype Asia 1, I22P/T100P/V124P), SEQ ID NO: 348 (Asial Shamir, 122P/T100P/V124P), SEQ ID NO: 350 (C3 Indaial, 122P/T100PN/V24P), SEQ ID NO: 352 (01 PanAsia, I22P/T100PN/V124P), SEQ ID NO: 354 (01 Manisa isolate 87 strain, serotype O, 122P/T100P/V124P), SEQ ID NO: 356 (SAT1-20 iso11, 122P/T100P/V124P), SEQ ID NO: 358 (SAT2 Egypt 2010, I22P/T100P/V124P) and SEQ ID NO: 360 (SAT3 ZIM/6/91, I22P/T100P/V124P).

[0296] In some embodiments, the modified picornavirus 3C protease encoded by the isolated polynucleotide described herein and the present modified picornavirus 3C protease comprises a modified Bovine rhinitis 3C protease selected from among SEQ ID NO: 412 (Bovine rhinitis A Sd-1, C23P), SEQ ID NO: 414 (Bovine rhinitis A Sd-1, F120P), SEQ ID NO: 416 (Bovine rhinitis A Sd-1, L123P), SEQ ID NO: 418 (Bovine rhinitis A Sd-1, T96P), SEQ ID NO: 420 (Bovine rhinitis A Sd-1, V22P), SEQ ID NO: 424 (Bovine rhinitis B, L124P), SEQ ID NO: 426 (Bovine rhinitis B R23P), SEQ ID NO: 428 (Bovine rhinitis B, T97P), SEQ ID NO: 430 (Bovine rhinitis B, V121) and SEQ ID NO: 432 (Bovine Rhinitis B, V22P).

[0297] In some embodiments, the modified picornavirus 3C protease encoded by the isolated polynucleotide described herein and the present modified picornavirus 3C protease comprises a modified Equine rhinitis A 3C protease selected from among SEQ ID NO: 436 (Equine rhinitis A, A125P), SEQ ID NO: 438 (Equine rhinitis A, C23P), SEQ ID NO: 440 (Equine rhinitis A, T127P), SEQ ID NO: 442 (Equine rhinitis A, V100P) and SEQ ID NO: 446 (Equine rhinitis A, Y22P).

[0298] In some embodiments, the modified picornavirus 3C protease encoded by the isolated polynucleotide described herein and the present modified picornavirus 3C protease comprises a modified Enterovirus A 3C protease selected from among SEQ ID NO: 464 (Human Coxsackievirus A10 Kowalik, L102P), SEQ ID NO: 466 (Human Coxsackievirus A10 Kowalik, (M109P), SEQ ID NO: 468 (Human Coxsackievirus A10 Kowalik, N105P), SEQ ID NO: 470 (Human Coxsackievirus A10 Kowalik, Q19P), SEQ ID NO: 472 (Human Coxsackievirus A10 Kowalik, T106P), SEQ ID NO: 474 (Human Coxsackievirus A10 Kowalik, T20P), SEQ ID NO: 476 (Human Coxsackievirus A10 Kowalik, T87P), SEQ ID NO: 512 (Human Enterovirus A71 Strain C4, I104P), SEQ ID NO: 514 (Human Enterovirus A71 Strain C4, M109P), SEQ ID NO: 516 (Human Enterovirus A71 Strain C4, N105P), SEQ ID NO: 518 (Human Enterovirus A71 Strain C4, Q19P), SEQ ID NO: 520 (Human Enterovirus A71 Strain C4, T106P), SEQ ID NO: 522 (Human Enterovirus A71 Strain C4, T20P) and SEQ ID NO: 524 (Human Enterovirus A71 Strain C4, T87P).

[0299] In some embodiments, the modified picornavirus 3C protease encoded by the isolated polynucleotide described herein and the present modified picornavirus 3C protease comprises a modified Enterovirus B 3C protease selected from SEQ ID NO: 480 (Human Coxsackievirus B1, F109P), SEQ ID NO: 482 (Human Coxsackievirus B1, K19P), SEQ ID NO: 484 (Human Coxsackievirus B1, L102P), SEQ ID NO: 486 (Human Coxsackievirus B1, N105P), SEQ ID NO: 488 (Human Coxsackievirus B1, R87P), SEQ ID NO: 490 (Human Coxsackievirus B1, T106P), SEQ ID NO: 492 (Human Coxsackievirus B1, T20P), SEQ ID NO: 496 (Human Coxsackievirus B3 Macocy (F109P), SEQ ID NO: 498 Human Coxsackievirus B3 Macocy, K19P), SEQ ID NO: 500 (Human Coxsackievirus B3 Macocy, L102P), SEQ ID NO: 502 (Human Coxsackievirus B3 Macocy, N105P), SEQ ID NO: 504 (Human Coxsackievirus B3 Macocy. R87P), SEQ ID NO: 506 (Human Coxsackievirus B3 Macocy, T106P) and SEQ ID NO: 508 (Human Coxsackievirus B3 Macocy, T20P).

[0300] In some embodiments, the modified picornavirus 3C protease encoded by the isolated polynucleotide described herein and the present modified picornavirus 3C protease comprises a modified Enterovirus C 3C protease selected from among SEQ ID NO: 448 (Human Coxsackievirus A1 Tompkins, F109P), SEQ ID NO: 450 (Human Coxsackievirus A1 Tompkins, L102P), SEQ ID NO: 452 (Human Coxsackievirus A1 Tompkins, N105P), SEQ ID NO: 454 (Human Coxsackievirus A1 Tompkins, R87P), SEQ ID NO: 456 (Human Coxsackievirus A1 Tompkins, T106P), SEQ ID NO: 458 (Human Coxsackievirus A1 Tompkins, T19P), SEQ ID NO: 460 (Human Coxsackievirus A1 Tompkins, T20P), SEQ ID NO: 540 (Human Poliovirus 2 Strain R93152, 1103P), SEQ ID NO: 542 (Human Poliovirus 2 Strain R93152, L102P), SEQ ID NO: 544 (Human Poliovirus 2 Strain R93152, R87P), SEQ ID NO: 546 (Human Poliovirus 2 Strain R93152, T19P), SEQ ID NO: 548 (Human Poliovirus 2 Strain R93152, T20P), SEQ ID NO: 550 (Human Poliovirus 2 Strain R93152, V104P), SEQ ID NO: 554 (Human Poliovirus 3 Isolate CHN5275/JX/CHN/2001, 1103P), SEQ ID NO: 556 (Human Poliovirus 3 Isolate CHN5275/JX/CHN/2001, L102P), SEQ ID NO: 558 (Human Poliovirus 3 Isolate CHN5275/JX/CHN/2001, R87P), SEQ ID NO: 560 (Human Poliovirus 3 Isolate CHN5275/JX/CHN/2001, T19P), SEQ ID NO: 562 (Human Poliovirus 3 Isolate CHN5275/JX/CHN/2001, T20P), SEQ ID NO: 564 (Human Poliovirus 3 Isolate CHN5275/JX/CHN/2001, V104P), SEQ ID NO: 568 (Human Poliovirus Mahoney, 1103P), SEQ ID NO: 570 (Human Poliovirus Mahoney, L102P), 572 (Human Poliovirus Mahoney, R87P), SEQ ID NO: 574 (Human Poliovirus Mahoney, T19P), 576 (Human Poliovirus Mahoney, T20P) and SEQ ID NO: 578 (Human Poliovirus Mahoney, V104P).

[0301] In some embodiments, t the modified picornavirus 3C protease encoded by the isolated polynucleotide described herein and the present modified picornavirus 3C protease comprises a modified Rhinovirus A 3C protease selected from among SEQ ID NO: 596 (Human Rhinovirus A20, Strain VR1130 (K88P), SEQ ID NO:598 (Human Rhinovirus A20, Strain VR1130, R87P), SEQ ID NO: 600 (Human Rhinovirus A20, Strain VR1130, T19P), SEQ ID NO: 602 (Human Rhinovirus A20, Strain VR1130, T20P), SEQ ID NO: 606 (Human Rhinovirus A89, Strain VR1199, I114P), SEQ ID NO: 608 (Human Rhinovirus A89, Strain VR1199, K88P), SEQ ID NO: 610 (Human Rhinovirus A89, Strain VR1199, R87P), SEQ ID NO: 612 (Human Rhinovirus A89, Strain VR1199, T112P), SEQ ID NO: 614 (Human Rhinovirus A89, Strain VR1199, T19P), SEQ ID NO: 616 (Human Rhinovirus A89, Strain VR1199, T20P), SEQ ID NO: 622 (Human Rhinovirus A2, I114P), SEQ ID NO: 624 (Human Rhinovirus A2, Q108P), SEQ ID NO: 626 (Human Rhinovirus A2, R87P), SEQ ID NO: 628 (Human Rhinovirus A2, R88P), SEQ ID NO: 630 (Human Rhinovirus A2, T112P), SEQ ID NO: 632 (Human Rhinovirus A2, T19P) and SEQ ID NO: 634 (Human Rhinovirus A2, T20P).

[0302] In some embodiments, the modified picornavirus 3C protease encoded by the isolated polynucleotide described herein and the present modified picornavirus 3C protease comprises a modified Rhinovirus B 3C protease selected from among SEQ ID NO: 582 (Human rhinovirus B14, E114P), SEQ ID NO: 584 (Human rhinovirus B14, G88P), SEQ ID NO: 586 (Human rhinovirus B14, I1112P), SEQ ID NO: 588 (Human rhinovirus B14, R87P), SEQ ID NO: 590 (Human rhinovirus B14, T19P) and SEQ ID NO: 592 (Human rhinovirus B14, T20P).

[0303] In some embodiments, the modified picornavirus 3C protease encoded by the isolated polynucleotide described herein and the present modified picornavirus 3C protease comprises a modified Hepatovirus 3C protease selected from among SEQ ID NO: 654 (Human hepatitis A Virus, V18P), SEQ ID NO: 652 (Human hepatitis A Virus, G17P), SEQ ID NO: 528 (Human hepatitis A Virus, E20P), SEQ ID NO: 530 (Human hepatitis A Virus, G19P), SEQ ID NO: 532 (Human hepatitis A Virus, I130P), SEQ ID NO: 534 (Human hepatitis A Virus, M128P), SEQ ID NO: 536 (Human hepatitis A Virus, T100P).

[0304] Further Modifications, Provisos

[0305] Further modifications may be made to a polynucleotide sequence encoding a modified picornavirus 3C protease of the present disclosure and/or a modified picornavirus 3C protease as described herein. For example, prior to the transformation of a host cell, codon frequency of a polynucleotide sequence encoding a modified picornavirus 3C protease may be modified to optimize expression or stability of a nucleic acid encoding a modified picornavirus 3C protease. Software suitable for optimizing codon usage is known and may be used to optimize codon usage in nucleic acid encoding a modified picornavirus 3C protease, see Optimizer available at genomes._urv.cat/OPTIMIZER/ (last accessed Feb. 5, 2016). Codon usage frequencies for various organisms are known and are also incorporated by reference to the Codon Usage Database at www._kazusa.or.jp/codon/ (last accessed Feb. 5, 2016).

[0306] Not all amino acid codons are degenerate, for example, in the genetic code of most organisms, Met and Trp are encoded by single codons. However, for degenerate codons, frequency or average frequency of codon usage may be selected to range from 0% (no common degenerate codons) to 100% (same frequency of codon usage as host cell genome). This range includes all intermediate values include 0%, 10%, 20%, 30%, 400%, 50%, 60%, 70%, 80%, 90%, 95% and 100%. Similarly, G+C content of a nucleic acid encoding a modified picomavirus 3C protease may be matched, moved closer or moved away from that of the host cell by selection of a degenerate codon with more or fewer G or C nucleotides. G+C content of exogenous nucleic acids encoding a modified picornavirus 3C protease of the present disclosure may range within 1, 2, 3, 4, 5, 6, 7, 8, 9, 10, 20, 30, 40, 50% more or less than the average G+C content of the host cell.

[0307] Alternatively, codon usage may be modified to modulate or control the expression of a modified picornavirus 3C protease of the present disclosure and/or to attenuate the expression of host cell proteins required for host cell viability, growth, or robustness; see for example, Kew, et al., U.S. Pat. No. 8,846,051 hereby incorporated by reference in its entirety. In some embodiments, expression of a modified picomavirus 3C protease by a host cell may be limited or reduced by 5, 10, 20, 30, 40, 50, 60, 70, 80, 90, 95% or more compared to a maximum expression rate (e.g., where codon frequency is matched to the host cell).

[0308] In certain embodiments, it is desirable that an arginine residue at position 126 (R126) of a modified FMDV 3C protease encoded by an isolated polynucleotide of the present disclosure is not substituted. As a non-limiting example, a modified FMDV 3C protease provided herein does not include a substitution of R126 with an acidic amino acid, such as aspartic acid and glutamic acid. More particularly, the modified FMDV 3C protease does not include a substitution of R126 with a glutamic acid (i.e., R126E).

[0309] In certain embodiments, it is desirable that the leucine residue at position 42 (L42) of a modified FMDV 3C protease of a modified picornavirus encoded by an isolated polynucleotide of the present disclosure is substituted with histidine. The modified FMDV 3C protease may be derived or obtained from any serotype described herein. Exemplary modified FMDV 3C proteases encoded by the isolated polynucleotide of the present disclosure, which incorporate a histidine at position 42 are set forth in SEQ ID NOS: 158, 160, 162, 164, 166, 168, 170, 172, 174 and 176. SEQ ID NOS: 158, 160,162, 164, 166, 168, 170, 172, 174 and 176 are encoded, respectively, by SEQ ID NOS: 157, 159, 161, 163, 165, 167, 169, 171, 173 and 175.

[0310] In certain embodiments, it is desirable that the threonine residue at position 34 be substituted with alanine and a methionine at position 88 be substituted with leucine in a modified FMDV 3C protease encoded by an isolated polynucleotide of the present disclosure. The modified FMDV 3C protease may be derived or obtained from any serotype described herein. Exemplary modified FMDV 3C proteases encoded by the isolated polynucleotide of the present disclosure, which incorporate an alanine and a leucine at positions 34 and 88, respectively, are set forth in SEQ ID NOS: 282, 284, 286, 288, 290, 292, 294, 296, 298 and 300, which are encoded, respectively, by SEQ ID NOS: 281, 283, 285, 287, 289, 291, 293, 295, 297, and 299, respectively.

[0311] Transgene Expression Cassettes

[0312] Another aspect of the present disclosure is directed to an isolated polynucleotide comprising an isolated polynucleotide encoding a modified picornavirus 3C protease of the present disclosure. In some embodiments, the isolated polynucleotide comprising the isolated polynucleotide encoding the modified picornavirus 3C protease is a transgene expression cassette. In some embodiments, the transgene expression cassette further includes a nucleotide sequence encoding a picornavirus P1 polypeptide precursor. In some embodiments, the nucleotide sequence encoding the P1 polypeptide precursor is obtained or derived from any of the A, O, C, Asia 1, SAT1, SAT2 and SAT3 serotypes, as well as the subtypes, topotypes and strains within these seven serotypes or other picornavirus isolates or variants.

[0313] In some embodiments, the nucleotide sequence encodes a picornavirus P1 polypeptide precursor, such as an FMDV P1 polypeptide precursor, is selected from among SEQ ID NO: 362 (A Turkey 2006, wild type), SEQ ID NO: 365 (A24 Cruzeiro iso71, wild type), SEQ ID NO: 368 (Asial Shamir, wild type), SEQ ID NO: 371 (C3 Indaial, wild type), SEQ ID NO: 374 (01 Manisa isolate 87 strain, serotype O, wild type), SEQ ID NO: 377 (01 PanAsia, wild type), SEQ ID NO: 380 (SAT1-20 iso11, wild type), SEQ ID NO: 383 (SAT2 Egypt 2010, wild type), and SEQ ID NO: 386 (SAT3 ZIM/6/91, wild type).

[0314] The amino acid sequences of the P1 polypeptides encoded by the nucleotide sequences immediately above include those described by SEQ ID NOS: 363, 366, 369, 372, 375, 378, 381, 384 and 387, respectively. A P1 polypeptide may be modified, for example, by deletion, substitution or insertion of 1, 2, 3, 4, 5, 6, 7, 8, 9, 10, 15, 20, or more amino acid residues provided that the P1 polypeptide retains or contains one or more epitopes, including both humoral and cellular epitopes, recognized by an animal's immune system (e.g., an FMDV mammalian host). Native P1 polypeptides are at least 62-10⁰% homologous. In some embodiments, a P1 polypeptide according to the present disclosure may be described as one capable of processing and assembling into a picornavirus capsid, such as an FMDV capsid. A P1 polypeptide may also be structurally described as having 60, 70, 80, 90, 95, 96, 97, 98, 99, or 100% (or any intermediate value) identical or similar to any of the P1 polypeptides disclosed herein or to other known P1 polypeptides.

[0315] In other embodiments, the polynucleotide sequence encoding a picornavirus P1 polypeptide precursor, such as an FMDV P1 polypeptide precursor, is modified to remove internal restriction sites. Such FMDV P1 polypeptide precursors may be selected from among: SEQ ID NO: 361 (A Turkey 2006, restriction sites removed), SEQ ID NO: 364 (A24 Cruzeiro iso71, restriction sites removed), SEQ ID NO: 367 (Asial Shamir, restriction sites removed), SEQ ID NO: 370 (C3 Indaial, restriction sites removed), SEQ ID NO: 373 (01 Manisa isolate 87 strain, serotype O, restriction sites removed), SEQ ID NO: 376 (01 PanAsia, restriction sites removed), SEQ ID NO: 379 (SAT1-20 iso11, restriction sites removed), SEQ ID NO: 381 (SAT2 Egypt 2010, restriction sites removed), and SEQ ID NO: 385 (SAT3 ZIM/6/91, restriction sites removed).

[0316] In another embodiment of the present disclosure, mutagenesis strategies and techniques as described herein may be applied to introduce one or more mutations to the nucleotide sequence encoding the polypeptide P1 precursor to enhance the stability of the final assembled capsid product. Among the mutations that can be introduced include, but are not limited to, nonsense mutations that effectively eliminate restriction enzyme recognition sites to better facilitate cloning and sub-cloning yet maintain the same translated protein product by not causing any amino acid substitution. These mutations enhance the cloning in and cloning out of the P1 polypeptide precursor into a transgene expression cassette to swap different P1 polypeptide precursors from different, e.g., FMDV serotypes, to promptly respond to the needs of individual outbreaks.

[0317] In a further embodiment, the transgene expression cassette of the present disclosure further includes restriction enzyme recognition sites or sequences at each of the N-terminus and C-terminus of the expression cassette for cloning into an expression vector. Examples of these restriction enzyme recognition sites include but are not limited to recognition sequences for EcoRI, EcoRII, BamHI, HindIII, TaqI, NotI, HinFI, Sau3AI, PvuII, SmaI, NheI, HaeIII, HgaI, AluI, EcoRV, KpnI, PstI, SacI, SpeI, StuI, SphI, XbaI, SalI, ScaI, XcmI, BsiWI, XhoI, BstEII, PflMI, AccI, SacII, PpuMI, AgeI, NcoI, BstXI, MluI and AatI. Such a transgene construct may be cloned into a vector or polynucleotide construct and transfected into a host cell.

[0318] In some embodiments, the transgene expression cassette described in accordance with embodiments described herein does not encode a complete picornavirus genome and therefore cannot cause an accidental outbreak, for example, a foot-and-mouth disease outbreak, during manufacture, or administration of a vaccine containing the transgene expression cassette.

[0319] Furthermore, the transgene expression cassette, typically, only encodes one picomavirus non-structural protein, e.g., FMDV non-structural protein, such as a modified FMDV 3C protease encoded by an isolated polynucleotide of the present disclosure. Typically, animals treated with a vaccine containing the transgene expression cassette will not produce antibodies to other picornaviral, such as an Enterovirus, non-structural proteins that are expressed during a natural picornavirus infection. For example, if the transgene expression cassette contains a mutant nucleotide sequence encoding a modified FMDV 3C protease encoded by an isolated polynucleotide of the present disclosure, it will only produce antibodies for the modified FMDV 3C protease and not antibodies for other non-structural proteins, such as 2B, 2C, 3B, 3D, etc. See FIG. 1. The difference in antibody profiles produced after natural infection compared to vaccination with the transgene expression cassette confers the ability to differentiate infected animals from vaccinated animals and vice versa.

[0320] In some embodiments, the transgene expression cassette according to the instant disclosure can be constructed as a single open reading frame. The nucleotide sequence encoding the P1 polypeptide precursor may be positioned 5′ or 3′ to the nucleotide sequence encoding a modified picornavirus 3C protease, such as a modified FMDV 3C protease.

[0321] In certain embodiments, the transgene expression cassette further includes a translational regulatory element that is located between the nucleotide sequence encoding a P1 polypeptide precursor and the mutant nucleotide sequence encoding a modified picornavirus 3C protease, such as a modified FMDV 3C protease, to advantageously allow for individual, equimolar expression of the two proteins in a single open reading frame translation.

[0322] In some embodiments, the translational regulatory element is a translational interrupter sequence of 5 to 50 amino acid residues long, typically 15 to 40 residues, more typically 25 to 35 residues. In further embodiments, the translational interrupter sequence can contain portions of one or more modified picornavirus 3C protease(s) non-structural proteins (e.g., 1A, 1B, 1C, 1D, 2A, 2B, 2C, 3A, 3B, 3C, 3D). In some embodiments, the translational interrupter sequence is formed by incorporating an 11-amino acid sequence of the C-terminus of the 1D FMDV protein into the 18-amino acid FMDV 2A protein and a proline residue to the C-terminus of an FMDV 2A protein.

[0323] In some embodiments, the transgene expression cassette further includes a nucleotide sequence for initiation of translation in eukaryotes, such as a Kozak consensus sequence. In some embodiments, the nucleotide sequence encoding the P1 polypeptide precursor is positioned 5′ to the mutant nucleotide sequence encoding a modified picornavirus 3C protease, such as a modified FMDV 3C protease, and the eukaryotic translation initiation sequence is positioned upstream or 5′ to the nucleotide sequence encoding the P polypeptide precursor. In an alternative embodiment, the mutant nucleotide sequence encoding a modified picornavirus 3C protease, such as a modified FMDV 3C protease, is positioned 5′ to a nucleotide sequence encoding the P1 polypeptide precursor, and the eukaryotic translation initiation sequence is positioned upstream or 5′ to the mutant nucleotide sequence encoding a modified picornavirus 3C protease, such as a modified FMDV 3C protease.

[0324] In further embodiments, the transgene expression cassette includes a promoter. Like the eukaryotic translation initiation sequence in certain embodiments, the promoter is positioned upstream or 5′ to the nucleotide sequence encoding the P1 polypeptide precursor or the mutant nucleotide sequence encoding a mutant FMDV 3C protease, depending on the arrangement of the two nucleotide sequences encoding the P1 polypeptide precursor and a modified picornavirus 3C protease, such as a modified FMDV 3C protease. In certain embodiments, strong and constitutive promoters, including but not limited to SV40, CMV, UBC, EFIA, PGK, and CAG, can be advantageously incorporated into the transgene expression cassette of the present disclosure for prolonged high levels of transgene expression in mammalian hosts to induce a strong immune response. A stop codon sequence (e.g., TAA, TGA, or TAG) may optionally be added to the end of the transgene expression cassette of the present disclosure to ensure cessation of mRNA translation.

[0325] Vectors

[0326] Another aspect of the present disclosure is directed to vectors containing the transgene expression cassette as described herein. Typically, the transgene expression cassette is cloned into a mammalian expression vector system. In some embodiments, the transgene expression cassette is cloned into a pSNAP vector (New England Biolabs). Examples of pSNAP vectors comprising isolated polynucleotides encoding the modified 3C proteases of the present disclosure are set forth in SEQ ID NOS: 406-408 and 410. In further embodiments, modifications to the pSNAP vector include, but are not limited to, decreasing the overall vector size and/or removal of one or more restriction enzyme recognition sequences at the multiple cloning site.

[0327] In other embodiments, the vector used for transferring the transgene expression cassette is a minicircle DNA vector. Typically, a minicircle DNA vector is a minicircle carrying a transgene expression cassette and does not contain an empty vector without an insert.

[0328] The use of a minicircle DNA vector to carry and transfer a transgene expression cassette allows mammalian cells to be transfected (e.g., directly) without utilizing an intermediate eukaryotic host system (e.g., insect cell line production system). Directly transfecting a mammalian cell with a minicircle DNA vector carrying a transgene expression cassette can eliminate the costs and labor associated with maintaining large volumes of intermediate host cell cultures in production facilities and harvesting empty capsids or virus-like particle (VLPs) produced by intermediate host cells.

[0329] Furthermore, minicircle vectors are typically smaller than standard plasmid vectors and lack extraneous bacterial sequences. In some embodiments, these features enhance transfection of cells and enable an extended duration of transgene expression within the mammalian host cell. For example, a minicircle vector is smaller than a standard vector as it lacks extraneous bacterial sequences found on plasmids. Differences in size between plasmid vectors and minicircle vectors can be attributed to the lack of extraneous bacterial sequences, inclusion of an insubstantial amount of extraneous bacterial sequences in comparison to the overall size of the vector, such as appreciably smaller in comparison to the plasmid, and variations thereof.

[0330] Methods of producing minicircle vectors that are capable of inducing production of picornavirus virus-like particles in mammalian host cells typically include a two-step procedure. Firstly, a full-size parental plasmid containing bacterial sequences and a transgene is produced in, e.g., Escherichia coli. While the parental plasmid is still inside the E. coli host, the expression of a site-specific recombinase is induced and the prokaryotic or bacterial bone is excised by the enzyme at the recombinase recognition sites. Non-limiting examples of site-specific recombinases include Tyr- and Ser-recombinases such as Cre recombinase, Flp recombinase, ParA resolvase and PhiC31 integrase. An example of suitable materials, techniques, approaches, and methods are described in U.S. Pat. No. 8,236,548 which is hereby incorporated by reference in its entirety. Further description may be found in Kay et al., A Robust System for Production of Minicircle DNA Vectors, Nature Biotechnology, 28 1287-1289 (2010) which is hereby incorporated by reference in its entirety.

[0331] Transformed Host Cells

[0332] Another aspect of the present disclosure is directed to cells that are transformed or transfected with a vector carrying a transgene expression cassette expressing at least a picornavirus P1 polypeptide precursor and a modified picornavirus 3C protease, such as an FMDV 3 C protease, that is capable of fully processing a picornavirus P1 polypeptide precursor, such as an FMDV P1 polypeptide precursor, into individual picornavirus capsid proteins, such as FMDV capsid proteins, of VP1, VP2, VP3 and VP4 or VP0, VP1 and VP3, without reduced toxicity to the transformed or transfected host cell in comparison to a host cell transformed with a control 3C protease and at least a picornavirus P1 polypeptide precursor. The host cells may be prokaryotic, such as bacterial cells, or eukaryotic. Typically, the host cells are eukaryotic, such as but not limited to, animal cells (particularly mammalian cells), such as a human embryonic kidney cell line (HEK-293) or a continuous porcine cell line LF-BK αV/β6, plant cells and yeast cells. Specific suitable host cells are described herein including those under the heading “Summary.”

[0333] The host cells may be transformed using any conventional transformation techniques known to an ordinary artisan and as described herein. The host cells of the present disclosure may be grown under controlled conditions, generally outside of their natural environment, such as in a cell culture, prior to and/or post-transfection with the present transgene cassettes and/or recombinant vectors. In other embodiments, the host cells are grown inside of their natural environment, for example, as part of an organism.

[0334] Compositions

[0335] Other aspects of the present disclosure are directed to compositions comprising an isolated polynucleotide encoding a modified picornavirus 3C protease, a transgene expression cassette and/or a recombinant vector of the present disclosure and a pharmaceutically acceptable excipient, adjuvant, buffer or solution that is suitable for proteolysis by the present modified picornavirus 3C protease.

[0336] In some embodiments, the compositions of the present disclosure are immunogenic compositions, such as vaccines, typically DNA vaccines. As used herein, the term “immunogen” or “immunogenic” refers to any substrate that elicits an immune response in a host, e.g., an antibody response. The immunogenic compositions disclosed herein may or may not be immunoprotective or therapeutic. Accordingly, the term “immunogenic” is not intended to be limited to vaccines.

[0337] The term “elicit an immune response” refers to the stimulation of immune cells in vivo in response to a stimulus, such as an antigen. The immune response may include either or both of a cellular immune response, e.g., T cell and macrophage stimulation, and a humoral immune response, e.g., B cell and complement stimulation and antibody production. An immune response may be measured using techniques well-known in the art, including, e.g., antibody immunoassays, proliferation assays, and others.

[0338] In some embodiments, the immunogenic composition described herein may be used to obtain an antibody composition, which may then be administered to a subject to provide temporary immunity, i.e., artificially acquired passive immunity. Methods for preparing and administering such antibody compositions are known in the art and are described, for example, in U.S. Pat. No. 4,748,018, which is herein incorporated by reference in its entirety.

[0339] In some embodiments, the immunogenic composition of the present disclosure is a vaccine. The term “vaccine” as used herein refers to a composition comprising an antigen, which is useful to establish immunity to a virus in the subject. Vaccines may be prophylactic or therapeutic. For example, a vaccine may prevent, ameliorate, palliate, or eliminate the effects of a virus on a subject.

[0340] In some embodiments, the immunogenic compositions of the present disclosure can include an immunogenic amount of one or more vectors carrying a transgene expression cassette expressing at least a picornavirus P1 polypeptide precursor, such as an FMDV P1 polypeptide precursor, and a modified picornavirus 3C protease, such as a modified FMDV 3C protease, which is capable of fully processing the picornavirus P1 polypeptide precursor into individual picornavirus capsid proteins of VP1, VP2, VP3 and VP4 or VP0, VP1 and VP3 with reduced toxicity to the transformed or transfected host cell in comparison to a host cell that has been transformed or transfected with a control picornavirus 3C protease and at least a picornavirus P1 polypeptide precursor. An “immunogenic amount” is an amount capable of eliciting an immune response against a picornavirus, e.g., FMDV.

[0341] In one or more embodiments, the compositions, immunogenic compositions such as vaccines of the present disclosure may be formulated by any well-known method. The compositions can be prepared, for example, as injectables (e.g. subcutaneous, intradermal and intramuscular injection, jet injections), formulations for oral administration, intranasal administration (e.g. aerosol inhalation or instillation), topical administration to the eye, electroporation, gene gun, transfection, liposome-mediated delivery or combinations thereof, either as liquid solutions or suspensions. Solid forms suitable for solution in, or suspension in, liquid prior to injection or other administration may also be prepared. The preparation may also be emulsified or encapsulated in liposomes.

[0342] In one or more embodiments, the vaccines of the present disclosure may be formulated as multivalent or polyvalent vaccines containing immunogenic compositions that stimulate an immune response towards two or more different strains of the same species or of different species. In additional embodiments, the multivalent vaccines of the present disclosure contain at least one picornavirus capsid that is formed from VLPs processed from a P1 precursor using a modified picornavirus 3C protease, or 3CD fusion, of the present disclosure or a recombinant vector of the present disclosure. In yet further embodiments, the multivalent vaccines may include other immunogenic compositions, including, but not limited to full microbes that are either live, killed, attenuated or inactivated; toxoids thereof, subunits thereof, VLPs thereof; conjugates thereof; or nucleic acids thereof.

[0343] In one or more embodiments, the active immunogenic ingredients, e.g., a vector comprising a polynucleotide encoding a modified 3C protease, or 3CD fusion, and a P1 precursor polypeptide are mixed with adjuvants, salts, carriers, excipients or diluents, which are pharmaceutically acceptable and compatible with the active ingredient.

[0344] In some embodiments, adjuvants may be added to the present immunogenic compositions, e.g., vaccines, to modify the immune response by boosting it such as to give a higher amount of antibodies and a longer-lasting protection, thus minimizing the amount of injected foreign material. Adjuvants may also be used to enhance the efficacy of vaccines by helping to subvert the immune response to particular cell types of an immune system, for example by activating the T cells instead of antibody-secreting B cells. Example of adjuvants include, but are not limited to, aqueous-based aluminum hydroxide gel-saponin, the oil-based Montanide ISA 206, other aluminum-based adjuvants, incomplete Freunds adjuvant (IFA), and paraffin oil.

[0345] In a further embodiment, pharmaceutically acceptable salts, include but are not limited to, the acid addition salts (formed with free amino groups of the peptide) which are formed with inorganic acids (e.g., hydrochloric acid or phosphoric acids) and organic acids (e.g., acetic, oxalic, tartaric, or maleic acid). Salts formed with the free carboxyl groups may also be derived from inorganic bases (e.g., sodium, potassium, ammonium, calcium, or ferric hydroxides), and organic bases (e.g., isopropylamine, trimethylamine, 2-ethylamino-ethanol, histidine, and procaine).

[0346] In a further embodiment, example carriers include, but are not limited to, liquid carriers (e.g., water, saline, culture medium, saline, aqueous dextrose, aqueous glycols) and solid carriers (e.g., carbohydrates such as starch, glucose, lactose, sucrose, dextrans; anti-oxidants such as ascorbic acid and glutathione, hydrolyzed proteins).

[0347] In a further embodiment, suitable excipients include but are not limited to water, saline, dextrose, glycerol, ethanol, or the like and combinations thereof.

[0348] In a further embodiment, example diluents include, but are not limited to, water, physiological saline solution, human serum albumin, oils, polyethylene glycols, glycerin, propylene glycol or other synthetic solvents, antibacterial agents such as benzyl alcohol, antioxidants such as ascorbic acid or sodium bisulfite, chelating agents, such as ethylene diamine-tetra-acetic acid, buffers such as acetates, citrates or phosphates and agents for adjusting osmolarity, such as sodium chloride or dextrose.

[0349] In a further embodiment, the vaccines may contain minor amounts of auxiliary substances such as wetting or emulsifying agents, pH buffering agents, and/or other agents, which enhance the effectiveness of the vaccine. Examples of agents which may be effective include, but are not limited to: aluminum hydroxide; N-acetyl-muramyl-L-threonyl-D-isoglutamine (thr-MDP): N-acetyl-nor-muramyl-L-alanyl-D-isoglutamine (CGP 11637, referred to as nor-MDP); N-acetyl muramyl-L-alanyl-D-isoglutaminyl-L-alanine-2-(1′-2′-dipalmitoyl-sn-glycero-3-hydroxyphosphoryloxy)-ethyl amine (CGP 19835A, referred to as MTP-PE); and RIBI, which contains three components extracted from bacteria: monophosphoryl lipid A, trehalose dimycolate and cell wall skeleton (MPL+TDM+CWS) in a 2% squalene/Tween 80 emulsion. The effectiveness of the auxiliary substances may be determined by measuring the amount of antibodies (especially IgG, IgM or 19A) directed against the immunogen resulting from administration of the immunogen in vaccines which comprise the adjuvant in question. In a further embodiment, additional formulations and modes of administration may also be used.

[0350] In one or more embodiments, the picornavirus vaccines in accordance with the present disclosure, such as the FMDV vaccines, are marker vaccines or DIVA (Differentiating Infected from Vaccinated Animals), which induce immune responses that differ from those from natural infection. These differences are reflected in antibody profiles, and can be detected by diagnostic tests and assays such as enzyme linked immunosorbent assays (ELISAs) containing the same compositions used in the vaccine formulations. The DIVA strategy is useful in eradication scenarios wherein emergency vaccination using DIVA picornaviral vaccines, such as FMDV vaccines, could be an effective control tool for, e.g., picornaviral outbreaks, such as FMDV outbreaks, in densely populated livestock areas. DIVA vaccination can limit the number of culled animals in the process of a picornaviral eradication, such as an FMDV eradication, thereby enhancing public acceptance for disease control measures and limiting economic losses.

[0351] The efficacy of a picornavirus DNA vaccine may be determined by the rate of reduction in the incidence of a picornavirus among a population of subjects that have been vaccinated compared to the incidence in a population of unvaccinated subjects, over a duration of 12 months. Vaccine efficacy can be measured using the following formula:

VE=[(ARU−ARV)/ARU]×100%

where “VE” is vaccine efficacy, “ARU” is an attack rate in an unvaccinated population and “ARV” is an attack rate in the vaccinated population

[0352] In some embodiments, a picornavirus DNA vaccine, such as an FMDV vaccine, comprising a minicircle DNA vector in accordance with the present disclosure exhibits VE values of between 50-95%, approximately 50%, greater than 50%, 50%, approximately 75%, approximately 75%, greater than 75%, approximately 90%, greater than 90%, 95%, approximately 95%, or greater than 95%.

[0353] In certain embodiments, the compositions of the present disclosure, including the immunogenic compositions and vaccines, comprise an immunogenic amount of one or more picornavirus VLPs isolated and purified from a host cell culture, fragment(s) thereof, or subunit(s) thereof. In some embodiments, the VLPs are obtained using the modified 3C proteases as herein provided. In other embodiments, the vaccines can include one or more picornavirus capsid proteins and/or portions thereof, in combination with adjuvant molecules and portions thereof on the surfaces of the picornavirus VLPs, optionally further include another protein or other immunogen, such as one or more additional picornavirus viral components naturally associated with viral particles or an epitopic peptide derived therefrom.

[0354] Methods

[0355] Another aspect of the present disclosure is directed to protecting a mammalian subject against one or more strains of a picornavirus, such as FMDV, by administering to the mammalian subject a genetically engineered DNA (e.g., transgene expression cassette+expression vector) to produce an immune response through assembly of picornavirus VLPs, such as FMDV VLPs, in situ in the mammalian subjects. Suitable mammalian subjects may include any mammalian subject including humans, primates and/or cloven-hoofed animals including domestic and wild bovids such as bison, African buffalo, antelopes, impala, gazelles, sheep, goats and domestic cattle.

[0356] There are a number of advantages associated with DNA vaccine platforms, in comparison to traditional whole-pathogen vaccines and protein-based vaccines. For example, DNA vaccines do not contain an actual infectious agent, whether dead or alive. DNA vaccines can also be easily lyophilized for long-term storage and transportation and do not require any cold chain delivery.

[0357] Additionally, the DNA vector of a DNA vaccine can be produced and modified more quickly and more easily in comparison to a traditional vaccine preparation. This allows a more rapid response to specifically engineer DNA vaccines tailored to individual picornavirus outbreaks, such as FMDV outbreaks, including, but not limited to a DNA vaccine matching a specific picornavirus, such as a specific FMDV outbreak that is due to a particular strain or serotype. In some embodiments, using a minicircle DNA vector to carry and transfer the transgene expression cassette eliminates the use of an intermediate eukaryotic host system and the associated costs and labor, including modification of an intermediate host system during an outbreak, such as during the onset of an FMDV outbreak.

[0358] In one or more embodiments, the picornavirus vaccines, e.g., an FMDV vaccine, are administered prophylactically (e.g., to prevent or ameliorate the effects of a future infection), therapeutically (e.g., to treat or to empower the immune system of an infected organism) or both, in a manner compatible with a dosage formulation, and in such an amount and manner as will be prophylactically and/or therapeutically effective. The quantity to be administered for a DNA picornavirus vaccine as described herein is generally in the range of 1-1000 μg, typically 5-500 μg, more typically 50-550 μg, even more typically 100-200 μg of pre-assembled picornavirus VLPs per dose and/or adjuvant molecule per dose, depending on the subject to be treated, the capacity of the host immune system to synthesize antibodies, and the degree of protection desired. Precise amounts of the active ingredient required to be administered may depend on the judgment of the veterinarian or physician or may be peculiar to each individual subject, but such a determination is within the skill of such a practitioner.

[0359] The present immunogenic composition, e.g., vaccine, may be given in a single dose; two dose schedule, for example two to eight weeks apart; or a multiple dose schedule. A multiple dose schedule is one in which a primary course of vaccination may include 1 to 10 or more separate doses, followed by other doses administered at subsequent time intervals as required to maintain and/or reinforce the immune response (e.g., at 1 to 4 10 months for a second dose, and if needed, a subsequent dose(s) after several months).

[0360] Another aspect of the present disclosure is directed to a method of preparing picornavirus virus-like particles (VLPs), e.g., FMDV virus-like particles, which may be incorporated into the present compositions, e.g., the immunogenic compositions, such as the vaccine compositions described herein. In certain embodiments of the present disclosure, picornavirus VLPs, such as FMDV VLPs, are produced after contacting a picornavirus P1 polypeptide precursor with a modified picornavirus 3C protease, or 3CD fusion, encoded by the isolated polynucleotide of the present disclosure.

[0361] In some embodiments, a picornavirus P1 polypeptide precursor and a modified picornavirus 3C protease, or 3CD fusion, of the present disclosure are co-expressed in vivo inside a host cell that is transformed with a recombinant vector carrying a transgene expression cassette containing at least a mutant nucleotide sequence encoding a modified picornavirus 3C protease, or 3CD fusion, as described herein and a picornavirus P1 polypeptide precursor. The expressed picornavirus P1 polypeptide precursor may then be fully processed and cleaved by the expressed modified picornavirus 3C protease, or 3CD fusion, of the present disclosure into individual picornavirus capsid proteins of VP1, VP2, VP3 and VP4 or VP0, VP1 or VP3 and wherein these capsid proteins self-assemble to form empty picornavirus capsids. Picornavirus VLPs may assemble to form one or more picomavirus capsids, which may be isolated and purified from their host cells.

[0362] In other embodiments, picornavirus VLP production occurs in vitro. In these embodiments, VLPs are produced, e.g., in a test tube with appropriate solutions, buffers and/or cultural medium, or in a petri dish. The picornavirus VLPs produced in vitro may then be isolated and purified from the in vitro environment.

### EXAMPLES

### Example 1. Materials and Methods

[0363] 1A. Isolation of pJJP Mutant Constructs

[0364] In order to assess the effects of modified FMDV 3C proteases on transgene expression, polynucleotide constructs were first synthesized into a pJJP plasmid (GenScript Inc., Piscataway, N.J.) containing a sequence encoding the P1-2A polypeptide from FMDV O1 Manisa iso87 (Accession: AY593823), the FMDV Asial Shamir 3C (Accession: AY593800), and the Δ1D2A-SGLuc (Δ1M) secreted biomarker. See Puckette et al., BMC Biotechnol., 2017, 17:52 for a description of 2A translational interrupter chimeras as reporters for transgene expression, which is herein incorporated by reference in its entirety. Select restriction cut sites were removed using silent mutations to facilitate easier cloning. The polynucleotide constructs were transformed into New England Biolabs (NEB) 5-Alpha competent E. coli (New England Biolabs Inc., Ipswitch, Mass.) according to the manufacturer's instructions for plasmid propagation. Cultures were grown at 37° C. overnight at 250 rotations per minute (rpm) in terrific broth with 100 micrograms per milliliter (μg/mL) carbenicillin. Plasmids were isolated using the QIAGEN® Plasmid Maxi kit (Qiagen Inc. Valencia Calif.).

[0365] 1B. Random Mutagenesis of 3C Protease

[0366] Random mutagenesis of FMDV 3C protease was performed utilizing a Diversify PCR Random Mutagenesis Kit (Takara Holdings Inc., Shimogyo-ku, Kyoto, Japan) according to the manufacturer's recommendation to generate two mutations per 1000 bp. The template utilized was a synthesized wild-type FMDV Asial Shamir 3C (Accession: AY593800) in pUC57kan (GenScript Inc.) while primers utilized for the amplification were Nde-3C-F2 (CATATGAGTGGTGCCCCACCGAC, SEQ ID NO: 641) and Rand-XhoXba-R (CCGATTCTAGACTCGAGTTA, SEQ ID NO: 642). PCR cleanup was performed using a QIAQUICK® PCR Purification kit (Qiagen Inc.), and PCR product digested by restriction enzymes NdeI and XhoI (New England Biolabs Inc.), as suggested by manufacturer. Digested PCR product was cloned into a pSNAP-tag (T7)-2 vector (New England Biolabs Inc.), which had been similarly processed, using T7 ligase (Roche Holding AG Basel, Switzerland) as per manufacturer's suggestions.

[0367] 1C. Bacterial Plating and Expression

[0368] Transformation of T7 Express Competent E. coli (New England Biolabs Inc.) was performed as suggested by the manufacturer. Prior to plating, transformed E. coli were incubated in 10 mL of 100 μg/ml carbenicillin Terrific broth for 3 hours at 37° C. After incubation, 200 microliters (μl) was spread on Isopropyl β-D-1-thiogalactopyranoside (IPTG), Carbenicillin (Carb) Luria-Bertani (LB) plates (+IPTG+CARB LB plates) and incubated at 37° C. overnight. Individual E. coli colonies were grown in 4 mL of +CARB LB media overnight for plasmid isolation using QIAPREP® Spin Miniprep kit (Qiagen Inc.). Isolated plasmids were sequenced using primers T7 (TAATACGACTCACTATAGGG, SEQ ID NO: 643) and pSNAP-SR (CGGATATAGTTCCTCCTTTC, SEQ ID NO: 644) for determination of nucleotide sequence. Plasmids encoding mutants of interest were then re-transformed into T7 Express Competent E. coli, cultured in broth, and grown on agar as previously described. See Puckette et al., J. Virol., 2017, 91: e00924-17 (pages 1-13), which is herein incorporated by reference in its entirety.

[0369] 1D. Evaluation of Transgene Expression and Processing

[0370] HEK293T cells (ATCC CRL-3216) were grown in 6-well plates (VWR International LLC, Radnor, Pa.) using 293 growth media (1× Dulbecco's Modified Eagle's medium (DMEM)), 10% fetal bovine serum, 1× antibiotic-antimycotic and 1× non-essential amino acids). For transfections, cells were rinsed with 2 mL of Dulbecco's phosphate-buffered saline (DPBS). One mL of fresh media was added to each well prior to transfection with 4 μg of plasmid DNA and 10 μL of lipofectamine 2000 (Invitrogen Inc., Carlsbad, Calif.). Cells were grown in a CO₂ incubator at 37° C. overnight prior to harvesting.

[0371] Luciferase activity was detected in media harvested from transfected cells using a 96-well BioSystems VERITAS™ luminometer (Turner Biosystems Co., Sunnyvale, Calif.) with 100 μL of 1:4 transfection media-diluted sample in each well. Readings were taken immediately upon injection of 100 μL of 50 μg/μl water soluble coelenterazine solution (NANOLIGHT™ Technologies, Prolume, Ltd Pinetop Ariz.) using an integration time of 0.5 seconds both before and after injection of substrate.

[0372] Lithium dodecyl sulfate (LDS) Sample Buffer (Invitrogen Inc., Carlsbad, Calif.), heated at 97° C. for 10 minutes, was loaded into wells of a 10-well NUPAGE® 4-12% Bis-Tris gel (Invitrogen Inc.). Gels were electrophoresed in 1×2-(N-morpholino)ethanesulfonic acid (MES) buffer (Invitrogen Inc.) at 200 Volts for 35 minutes then transferred onto membranes using the IBLOT® 2 system (Invitrogen Inc.).

[0373] Membranes were incubated in 5% milk blocking buffer for 1 hour at room temperature then washed three times with 1×PBS-TWEEN™ Tablets (MilliporeSigma Inc., St. Louis, Mo.) for 5 minutes each. Primary antibodies were added at 1:50 dilution mouse monoclonal antibodies F1412SA (anti-VP2) and 12FE9.2.1 (anti-VP1), and a 1:250 dilution for anti-VP3 rabbit polyclonal antibody and incubated for 1 hour at room temperature. See Yang et al. Veterinary Immunology and Immunopathology, 2007, 115: 126-134 (2007) regarding anti-VP1 and Stave et al., The Journal of General Virology, 1986, 67: 2083-2092 regarding anti-VP2)), which is herein incorporated by reference in its entirety.

[0374] Membranes were washed three times with 1× Phosphate Buffered Saline with TWEEN® 20 (PBST) for 5 minutes after the primary antibody incubation. 1:500 dilutions of the secondary antibodies, goat anti-mouse-horseradish peroxidase (HRP) and goat anti-rabbit-HRP (KPL) were applied to corresponding membranes for 1 hour at room temperature. After three final washes of 1×PBST, visualization was performed using SIGMAFAS™ 3,3′-diaminobenzidine tablets (MilliporeSigma Inc), as suggested by the manufacturer.

### Example 2. Results

[0375] 2A. Mutations of B₂ β Strand Residues (FMDV Residues 123-128)

[0376] In FMDV 3C protease crystal structures, the L127 residue is situated on the B₂ β strand, which forms a β sheet with the A₂ β strand (FIG. 13A). See also Birtley et al., 2005, The Journal of Biological Chemistry 280: 11520-11527 (2005), Zunszain et al., Journal of Molecular Biology, 2010, 395: 375-389 and Yang et al., 2016, PeerJ 4: 4e (2016))), which are each herein incorporated by reference in its entirety, regarding FMDV protease 3C crystal structures. Because proline is known to disrupt strand and β sheet structures, we performed scanning proline mutagenesis for each residue from 123 to 128 using an expression plasmid encoding the FMDV O1 Manisa (O1M) P1, 3C protease and the Δ1D2A-GLuc AIM biomarker (FIG. 13B). Not including L127P, four of the five tested residues resulted in an enhancement of transgene expression over wild-type (FIG. 13C). Of these four mutations, V124P demonstrated the most enhancement over wild-type while D123P, G125P, and I128P had less than one-third of the V124P activity. The L127P mutation maintained the largest enhancement in transgene expression among the B₂ β strand proline mutants. Interestingly, mutant R126P had no difference in transgene expression from wild-type (FIG. 13C).

[0377] For each mutation, cell lysates from transfected HEK293T cells were examined for processing of the FMDV O1M P1 polypeptide (FIG. 13D). Unlike the C163A activity knockout mutation at the catalytic triad, all six of the mutations retained the ability to process the O1M P1 polypeptide and displayed fully processed VP2 (FIG. 13D). 3C protease does not separate VP0 into VP4 and VP2. Such separation has been reported to be dependent upon proper interactions amongst VP0, VP3, and VP1 during formation of VLPs.

[0378] 2B. Random Mutagenesis Residues

[0379] To identify other novel mutations resulting in a phenotype similar to that of L127P, we conducted a random mutagenesis reaction and induced expression in E. coli bacteria to preferentially select for 3C protease mutations that enhance survivability and colony growth. Five different mutations were identified. Two mutations possessed premature stop codons and were not evaluated further. The remaining mutations, T100P, L23P, and L43H, individually present in clones of E. coli, were grown on both +CARB/+IPTG and +CARB agar growth medium to evaluate effects on the growth of E. coli. As depicted in FIG. 14, only L23P and T100P enhanced E. coli colony growth.

[0380] For evaluation in the HEK293T mammalian cells, we included adjacent mutations 122P and 199P to better understand if the enhancement was residue specific or, instead, was the result of structural disruption due to proline insertion. HEK293T cells were transfected with pJJP plasmids (FIG. 13B), containing mutants 122P, 123P, 199P or T100P for comparison to WT, L127P, and C163A. All four novel mutations demonstrated enhanced transgene expression when compared to wild-type. As depicted in FIG. 15A, the transgene expression levels were comparable amongst the I22P mutation and L127P.

[0381] For each mutation, cell lysates from transfected HEK293T cells were examined for processing of the FMDV O1M P1 polypeptide (FIG. 13D). All mutations, with the exception of the C163A activity knockout, retained the ability to process the O1M P1 polypeptide and displayed fully processed VP2 (FIG. 13D). The separation of VP0 into VP4 and VP2 is not processed by 3C protease and has been described as dependent upon proper interactions amongst VP0, VP3, and VP1 during the formation of VLPs.

[0382] Cell lysates were evaluated for P1 processing by western blotting. Different degrees of processing were measured, but none of the new mutants processed P1 as well as the L127P mutant (FIG. 15B). No signs of protein processing with mutant 199P were evident, although a small amount may be detected (FIG. 15B). Mutant T100P processed VP1 partially, as indicated by the presence of VP2, unprocessed P1, and a fusion peptide of VP3 and VP1 (VP3/VP1). Both I22P and L23P demonstrated similar processing profiles, with little P1 detected. However, the presence of VP3/VP1 suggested difficulties processing the junction of VP3 and VP1 (FIG. 15B).

[0383] Mutations I22P, L23P, and T100P, retained the ability to process the O1M P1 polypeptide and displayed fully processed VP2 (FIG. 15B). As noted above, the separation of VP0 into VP4 and VP2 is not processed by 3C protease and has been reported to be dependent upon proper interactions amongst VP0, VP3, and VP1 during the formation of VLPs.

[0384] 2C. Combination of Identified Mutations

[0385] Mutations represent alterations to different structures within the 3C^{pro}. Mutations V124P and L127P are present on the B₂ β strand, while I22P is present on the A₁ β strand and T100 is found on a loop between the F₁ and A₂′ β strands (FIG. 16). To determine their effects on 3C^{pro} activity, we produced combinations of L127P with three mutants identified in this study, i.e., I22P, T100P, and V124P. As depicted in FIG. 17A, the transgene expression level of I22P/T100P/V124P exceeded that of I22P/T100P/L127P (˜7.0×10¹⁰ Relative Luciferase Units (RLU)/0.5 seconds versus ˜4.5×10¹⁰ RLU/0.5 seconds).

[0386] Three double mutation constructs, I22P/L127P, T100P/L127P, and V124P/L127P, and two triple mutants, 122P/T100P/V124P and 122P/T100P/L127P, were expressed using pJJP plasmids and evaluated for P1 processing (FIG. 17B). Only the V124P/L127P double mutation construct retained a high degree of processing (FIG. 17B). The 122P/L127P construct retained weak processing, but failed to indicate any fully processed product by Western blot. No processed P1 was detected by Western blots for constructs containing T100P/L127P or either of the triple mutants.

[0387] 2D. Testing of Mutations in CHO-K1 and BHK-21 Cell Lines

[0388] The Chinese hamster ovary (CHO) cell line is one of the most widely used cell lines for biopharmaceutical manufacturing. Given its widespread adoption we chose to evaluate if identified mutations to the 3C^{pro} continued to enhance transgene expression over wild type and whether VLP array formation is retained. Mutant L127P produced the highest luciferase levels of the single mutations, however all mutations that enhanced output in HEK293-T cells also enhanced output in CHO-K1 cells (FIG. 22).

[0389] The Baby Hamster Kidney (BHK-21) cell line has long been used for the production of FMDV inactivated vaccines. Using transfected BHK-21 cells mutant I22P showed the highest luciferase levels with a slightly lower V124P being within range of the standard deviation, FIG. 22. Mutant L127P, while still dramatically superior to WT, showed reduced enhancement relative to 122P, T100P, and V124P (FIG. 22).

[0390] Processing efficiency, in both CHO-K1 and BHK-21 cell lines, of tested 3C^{pro} mutants was similar to that observed in HEK293-T cells (FIG. 23A). Electron microscopy confirmed VLP formation with the L127P mutant in transfected CHO-K1 cells (FIG. 23B) and with the V124P mutant in transfected BHK-21 cells (FIG. 23C).

[0391] 2E. Homologous Residues in Other Picornaviruses

[0392] We examined the published 3C protease crystal structures of five additional picornaviruses in relation to the published crystal structure for the FMDV 3C protease (Zunszain et al. Journal of Molecular Biology, 2010, 395:375-389) 4 (2016), which is herein incorporated by reference in its entirety. The five additional picornavirus 3C protease crystal structures are as follows: poliovirus (Mosimann et al., J. Mol. Biol., 1997, 273: 1032-1047), Human rhinovirus (Kawatkar et al., Bioorg. Med. Chem. Lett., 2016, 26: 3248-3252, Human enterovirus 71 (Wang et al., Journal of Virology, 2011, 85: 10021-10030), coxsackievirus B3 (Lee et al., J. Biol. Chem., 2009, 284: 7646-7655) and Hepatitis A Virus (Bergmann et al., Journal of Virology, 1997, 71: 2436-2448))), which are each herein incorporated by reference in its entirety.

[0393] 2E(i) Residues Homologous to V124P and L127P in Other Picornaviruses

[0394] In published FMDV 3C^{pro} crystal structures, the A₂-B₂ β sheet is not a component of the substrate binding pocket, but is in close proximity to the loop containing the C 163 residue (Birtley et al., 2005, The Journal of Biological Chemistry, 280: 11520-11527, Zunszain et al., Journal of Molecular Biology, 2010, 395: 375-389, Yang et al., PeerJ, 2016, 4: 4e (1964)), which are each herein incorporated by reference in its entirety. This finding led to speculation that the A₂-B₂ β sheet plays a role in substrate specificity (Birtley et al., 2005, The Journal of Biological Chemistry, 280: 11520-11527), which is herein incorporated by reference in its entirety. The side chains of residues V124 and L127 are the closest residues on the B₂ β strand to the side chain of residue Y162, which is adjacent to catalytic residue C163 (FIGS. 18A and 18B). Together with residues I119 and N121 of the A₂ strand, the side chains of these residues are directed towards the side chain of Y162 (FIG. 18A). This provides a close point of contact for the B₂ β strand, the 3C^{pro} binding pocket, and the catalytic triad. Neither mutant V124P nor L127P decreased proteolytic activity, suggesting that they do not severely impact the catalytic triad. The close proximity of V124P and L127P to residue Y162 may provide the means through which the mutation of either residue to proline results in a diminished capacity of 3C^{pro} to easily process host proteins (FIG. 18B). Similar structures are observed in other picornaviruses by examining the location of the residue immediately adjacent to the catalytic cysteine in relation to the side chain of strand structures (FIG. 19). The catalytic cysteine is residue 163 in FMDV, 172 in Hepatitis A Virus, and 147 in poliovirus, Human rhinovirus, Human enterovirus 71, and coxsackievirus B3. This led us to examine the interactions of side chains on nearby strand structures with residues 171 for Hepatitis A virus and 146 for poliovirus, Human rhinovirus, Human enterovirus 71, and coxsackievirus B3. We suggest that the following residues, if mutated, may result in reduction of 3C protease's adverse effects on host cell proteins: M128, I130, T121, and L119 for Hepatitis A Virus; V104, L102, and T142 for poliovirus; Q108, T112, I114, L102, and L104 for Human rhinovirus; T106, M109, and I104 for Human enterovirus 71; and M112, I114, F109, I104, and L102 for coxsackievirus B3.

[0395] 2E(ii). Residues Homologous to I22P and L23P in Other Picornaviruses

[0396] In FMDV, residues 122P and L23P are part of the A₁ β strand, which pairs with the B₁ β strand (FIG. 18C). The A₁-B₁ β strand pair, including residues 18-31, is adjacent to the peptide binding pocket, FIG. 18C, and undergoes conformational changes upon binding to substrate. See Zunszain et al., Journal of Molecular Biology, 2010, 395: 375-389, which is herein incorporated by reference in its entirety. This suggests that mutations 122P and L23P may impact substrate binding through alterations of the A₁ β strand structure which results in changes in the structure of the A₁-B₁ β strand pair. These alterations may influence the size and shape of the binding pocket disrupting substrate specificity.

[0397] Similar structures were observed in other picornaviruses by examining the residues of the β-sheet structure connected to the N-terminal helical domain (FIG. 20). This led to the identification of the following residues that, if mutated, may result in reduction of 3C protease host cell protein processing. Residues T20 and T19 in poliovirus, T20 and T19 in Human rhinovirus, T20 and Q19 in Human enterovirus 71, T20 and K19 in coxsackievirus B3, and E20 and G19 in Hepatitis A virus, FIG. 20.

[0398] 2E(iii) Residues Homologous to T100P in Other Picornaviruses

[0399] In FMDV, mutants 199P and T100P represent different P1 processing results despite being adjacent. Both are distal from the binding site and localized in the loop between the A₂′ β strand and the F₁ β strand, and in close proximity to the N- and C-terminal a helixes (FIG. 18D). It is possible that the disruption in total processing observed with 199P in contrast to that of T100P are facilitated through an influence of one or both of the terminal helices and subsequent disruptions in protein structure resulting from this interaction.

[0400] A similar structure was observed in other picornavirus 3C protease structures. In particular, the structure of a loop region following a 3 strand structure located between the N- and C-termini of the protein was present in all structures (FIG. 21). This led to the identification of the following residues that, if mutated, may result in reduction of 3C protease's adverse effects: residue R87 in poliovirus, R87 and R88 in Human rhinovirus, T87 and K88 in Human enterovirus 71, R87 and L90 in coxsackievirus B3, and T100 and Q101 in Hepatitis A virus (FIG. 21).

### Example 3. Alignments of Primary Amino Acid Sequences

[0401] Alignments of a primary amino acid sequence of an FMDV 3C protease with 3C proteases from other picornaviral species are depicted in FIGS. 4-12. Alignments were prepared using Clone Manager 9, Professional Edition, Version 9.4, 1 Jan. 2015, using Blossum 62, default parameters. The primary sequence alignments show the amino acids residues in non-FMDV picornaviral 3C proteases that correspond to, e.g., V124, L127, 122, L23 and T100 in FMDV 3C protease. The corresponding amino acids identified in the primary sequence alignments are generally consistent with those identified using the structural homology analysis described above.

1. An isolated polynucleotide encoding a modified picornavirus 3C protease,
wherein the modified picornavirus 3C protease comprises an altered secondary structure and one or more amino acid substitution(s) located at one or more amino acid position(s) corresponding to positions 16-25, 99-100 and 115-130 of a wild-type Foot-and-Mouth Disease Virus (FMDV) 3C protease,
wherein the isolated polynucleotide encoding the modified picornavirus 3C protease, when transformed into and co-expressed in a host cell, enhances transgene expression of a P1 precursor polypeptide in comparison to an amount of P1 precursor polypeptide transgene expression exhibited in a host cell transformed and co-expressed with a control picornavirus 3C protease,
wherein the one or more corresponding amino acid position(s) is/are identified by an alignment of the modified picornavirus 3C protease with the one or more of the wild type FMDV 3C protease(s), and
wherein the modified picornavirus 3C protease excludes a modified FMDV 3C protease with one or more amino acid substitutions, wherein the one or more amino acid substitutions are selected from the group consisting of an amino acid substitution at position 125, an amino acid substitution at position 126, an amino acid substitution at position 127, an amino acid substitution at position 128, an amino acid substitution at 129, an amino acid substitution at 130 and combinations thereof.

2. The isolated polynucleotide according to claim 1, wherein the altered secondary structure is selected from among:
an A₁-B₁ β sheet,
a loop between an F₁ β strand and an A₂ β strand, and
an A₂-B₂ β sheet,
wherein the one or more amino acid substitution(s) that alter the A₁-B₁ β sheet is/are located at position(s) corresponding to one or more of amino acid positions 16-25 of a wild type FMDV 3C protease,
wherein the one or more amino acid substitution(s) that alter the loop between the F₁ β strand and the A₂ β strand is/are located at position(s) corresponding to one or more of amino acid positions 99 and 100 of a wild type FMDV 3C protease, and
wherein the one or more amino acid substitution(s) that alter the A₂-B₂ β sheet is/are located at position(s) corresponding to one or more of amino acid positions 115-130 of a wild type FMDV 3C protease.

3. The isolated polynucleotide encoding the modified picornavirus 3C protease of claim 1,
wherein the modified picornavirus 3C protease is a modified Aphthovirus 3C protease selected from among one or more of:
a modified FMDV 3C protease comprising one or more amino acid substitution(s) at one or more position(s) selected from among 122 and L23,
a modified Bovine rhinitis A virus 3C protease comprising one or more amino acid substitution(s) at one or more position(s) selected from among V22 and C23,
a modified Bovine rhinitis B 3C protease comprising one or more amino acid substitution(s) at one or more position(s) selected from among V22 and R23, and
a modified Equine rhinitis 3C protease comprising one or more amino acid substitution(s) at one or more position(s) selected from among Y22 and C23;
wherein the modified picornavirus 3C protease is a modified Enterovirus A 3C protease selected from among one or more of:
a modified Human coxsackievirus A virus comprising one or more amino acid substitution(s) at one or more position(s) selected from among Q19 and Q20, and
a modified Human enterovirus A71 3C protease comprising one or more amino acid substitution(s) at one or more position(s) selected from among Q19 and T20;
wherein the modified picornavirus 3C protease is a modified Enterovirus B 3C protease selected from among one or more of:
a modified Human coxsackievirus B1 3C protease comprising one or more amino acid substitution(s) at one or more position(s) selected from among K19 and T20 and a modified Human coxsackievirus B3 3C protease comprising one or more amino acid substitution(s) at one or more position(s) selected from among K19 and T20;
wherein the modified picornavirus 3C protease is a modified Enterovirus C 3C protease selected from among one or more of:
a modified coxsackievirus A1 3C protease comprising one or more amino acid substitution(s) at one or more position(s) selected from among T19 and T20, and
a modified Human poliovirus 3C protease comprising one or more amino acid substitution(s) at one or more position(s) selected from among T19 and T20;
wherein the modified picornavirus 3C protease is a modified Rhinovirus A 3C protease comprising one or more amino acid substitution(s) at one or more position(s) selected from among T19 and T20; and
wherein the modified picornavirus 3C protease is a modified Rhinovirus A 3C protease comprising one or more amino acid substitution(s) at one or more position(s) selected from among T19 and T20,
wherein the modified picornavirus 3C protease is a modified Hepatitis A virus 3C protease comprising one or more amino acid substitutions at one or more position(s) selected from among G19 an T20.

4. The isolated polynucleotide encoding the modified picornavirus 3C protease of claim 1,
wherein the modified Aphthovirus 3C protease is selected from among one or more of:
a modified FMDV 3C protease comprising an amino acid substitution at V124,
a modified Bovine rhinitis A virus 3C protease comprising one or more amino acid substitution(s) at one or more position(s) selected from among F120 and L123,
a modified Bovine rhinitis B 3C protease comprising one or more amino acid substitution(s) at one or more position(s) selected from among V123 and L124, and
a modified Equine rhinitis 3C protease comprising one or more amino acid substitution(s) at one or more position(s) selected from among A125 and T127;
wherein the modified Enterovirus 3C protease is an Enterovirus A 3C protease selected from among one or more of:
a modified Human coxsackievirus A virus comprising one or more amino acid substitution(s) at one or more position(s) selected from among M112, V114, M109 I104 and L102, and
a modified Human enterovirus A71 3C protease comprising one or more amino acid substitution(s) at one or more position(s) selected from among T106, M109 and I104;
wherein the modified Enterovirus 3C protease is an Enterovirus B 3C protease selected from among one or more of:
a modified Human coxsackievirus B1 comprising one or more amino acid substitution(s) at one or more position(s) selected from among M112, I114, F109 I104 and L102 and
a modified Human coxsackievirus B3 comprising one or more amino acid substitution(s) at one or more position(s) selected from among M112, I114, F109 I104 and L102;
wherein the modified Enterovirus 3C protease is an Enterovirus V 3C protease selected from among one or more of:
a modified coxsackievirus A1 3C protease comprising one or more amino acid substitution(s) at one or more position(s) selected from among M112, I114, F109 V104 and L102, and
a modified Human poliovirus 3C protease comprising one or more amino acid substitution(s) at one or more position(s) selected from among V104 and L102;
wherein the modified Enterovirus 3C protease is a Rhinovirus 3C protease selected from among one or more of:
a modified Rhinovirus A 3C protease comprises one or more amino acid substitution(s) at one or more position(s) selected from among Q108, T112, I114, L102 and L104; and
a modified Rhinovirus B 3C protease comprises one or more amino acid substitution(s) at one or more position(s) selected from among I112 and E114;
wherein the modified Hepatovirus is a modified Hepatitis A virus 3C protease comprising one or more amino acid substitutions at one or more position(s) selected from among M128, I130, T121 and L119.

5. The isolated polynucleotide encoding the modified picornavirus 3C protease of claim 1,
wherein the modified picornavirus 3C protease is a modified Aphthovirus 3C protease is selected from among one or more of:
a modified FMDV 3C protease comprising an amino acid substitution at position T100,
a modified Bovine rhinitis A virus 3C protease comprising an amino acid substitution at position T96,
a modified Bovine rhinitis B 3C protease comprising an amino acid substitution at position T97, and
a modified Equine rhinitis 3C protease comprising an amino acid substitution at position V100;
wherein the modified picornavirus 3C protease is a modified Enterovirus A 3C protease selected from among one or more of:
a modified Human coxsackievirus A virus comprising an amino acid substitution at position T87, and
a modified Human enterovirus A71 3C protease comprising an amino acid substitution at position T87;
wherein the modified picornavirus 3C protease is a modified Enterovirus B 3C protease selected from among one or more of:
a modified Human coxsackievirus B1 comprising an amino acid substitution at position R87, and
a modified Human coxsackievirus B3 comprising an amino acid substitution at position R87;
wherein the modified picornavirus 3C protease is a modified Enterovirus C 3C protease selected from among one or more of:
a modified coxsackievirus A1 3C protease comprising an amino acid substitution at position R87, and
a modified Human poliovirus 3C protease comprising an amino acid substitution at position R87;
wherein the modified picornavirus 3C protease is a modified Rhinovirus 3C protease selected from among one or more of:
a modified Rhinovirus A 3C protease comprising one or more amino acid substitution(s) at one or more position(s) selected from among R87, R88 and G88; and
modified Rhinovirus B 3C protease comprising one or more amino acid substitution(s) at one or more position(s) selected from among R87 and K88; and
wherein the modified picornavirus 3C protease is a modified Hepatitis A virus 3C protease comprising one or more amino acid substitutions at one or more position(s) selected from among T100 and Q101.

6. The isolated polynucleotide encoding a modified picornavirus 3C protease according to claim 1, wherein the wild-type FMDV 3C protease is selected from among SEQ ID NOS: 2, 4, 6, 8, 10, 12, 14, 16, 18 and 20.

7. The isolated polynucleotide encoding the modified picornavirus 3C protease of claim 1,
wherein the modified picornavirus 3C protease is a modified Aphthovirus 3C protease is selected from among one or more of:
a modified FMDV 3C protease having at least 95% identity to one or more of a wild-type FMDV 3C protease selected from among SEQ ID NOS: 2, 4, 6, 8, 10, 12, 14, 16, 18 and 20;
a modified Bovine rhinitis 3C protease having at least 95% identity to one or more of a wild type Bovine rhinitis 3C protease selected from among SEQ ID NOS: 422 and 434; and
a modified Equine rhinitis 3C protease having at least 95% identity to the wild type Equine rhinitis 3C protease of SEQ ID NO: 444;
wherein the modified picornavirus 3C protease is a modified Enterovirus A 3C protease having at least 95% identity to a sequence selected from among:
the wild type Human coxsackievirus A10 3C protease of SEQ ID NO: 478 and
the wild type Human enterovirus A71 3C protease is SEQ ID NO:536;
wherein the modified picornavirus 3C protease is a modified Enterovirus B 3C protease having at least 95% identity to a sequence selected from among:
the wild type Human coxsackievirus B1 3C protease of SEQ ID NO: 494 and
the wild type Human coxsackievirus B3 3C protease of SEQ ID NO: 510;
wherein the modified picornavirus 3C protease is a modified Enterovirus C 3C protease having at least 95% identity to a sequence selected from among:
the wild type Human coxsackievirus A1 3C protease of SEQ ID NO: 462,
a wild type Human poliovirus 3C protease selected from among SEQ ID NOS:552, 566, and 580;
wherein the modified picornavirus 3C protease is a modified Rhinovirus having at least 95% identity to a sequence selected from among:
a wild type Human rhinovirus A 3C protease selected from among SEQ ID NOS: 604, 618 and 620; and
a wild type Rhinovirus B 3C protease of SEQ ID NO:594;
wherein the modified picornavirus 3C protease is a modified Hepatitis A virus 3C protease having at least 95% identity to the wild type Human hepatitis 3C protease of SEQ ID NO:538.

8. The isolated polynucleotide encoding the modified picornavirus 3C protease of claim 1,
wherein the modified picornavirus 3C protease is a modified Aphthovirus 3C protease selected from among one or more of:
a modified FMDV 3C protease selected from among SEQ ID NOS: 22, 24, 26, 28, 30, 32, 34, 36, 38, 40, 42, 44, 46, 48, 50, 52, 54, 56, 58, 60, 62, 64, 66, 68, 70, 72, 74, 76, 78, 80, 82, 84, 86, 88, 90, 92, 94, 96, 98, 100, 102, 104, 106, 108, 110, 112, 114, 116, 178, 180, 138, 140, 142, 144, 146, 148, 150, 152, 154, 156, 182, 184, 186, 188, 190, 192, 194, 196, 198, 200, 202, 204, 206, 208, 210, 212, 214, 216, 218, 220, 222, 224, 226, 228, 230, 232, 234, 236, 238, 240, 242, 244, 246, 248, 250, 252, 254, 256, 258, 260, 262, 264, 266, 268, 270, 272, 274, 276, 278, 280, 302, 304, 306, 308, 310, 312, 314, 316, 318, 320, 322, 324, 326, 328, 330, 332, 334, 336, 338, 340, 342, 344, 346, 348, 350, 352, 354, 356, 358 and 360,
a modified Bovine rhinovirus 3C protease selected from among SEQ ID NOS: 412, 414, 416, 418, 420, 424, 426, 428, 430 and 432, and
a modified Equine rhinovirus 3C protease selected from among SEQ ID NOS: 436, 438, 440, 442 and 446;
wherein the modified picornavirus 3C protease is a modified Enterovirus A 3C protease selected from among SEQ ID NO: 464, 466, 468, 470, 472, 474, 476, 512, 514, 516, 518, 520, 522 and 524;
wherein the modified picornavirus 3C protease is a modified Enterovirus B 3C protease selected from among SEQ ID NO: 480, 482, 484, 486, 488, 490, 492, 496, 498, 500, 502, 504, 506 and 508;
wherein the modified picornavirus 3C protease is a modified Enterovirus C 3C protease selected from among SEQ ID NO: 448, 450, 452, 454, 456, 458, 460 540, 542, 544, 546, 548, 550, 554, 556, 558, 560, 562, 564, 568, 570, 572, 574, 576 and 578;
wherein the modified picornavirus 3C protease is a modified Hepatitis A virus 3C protease selected from among SEQ ID NO: 528, 530, 532, 534, 536, 652 and 654;
wherein the modified picornavirus 3C protease is a modified rhinovirus 3C protease selected from among
a modified Rhinovirus A 3C protease selected from among SEQ ID NOS: 596, 598, 600, 602, 604, 606, 608, 610, 612, 614, 616, 618, 620, 622, 624, 626, 628, 630, 632 and 634; and
a modified Rhinovirus B 3C protease selected from among SEQ ID NO:582, 584, 586, 588, 590 and 592.

9. The isolated polynucleotide encoding the modified picornavirus 3C protease of claim 1, wherein said polynucleotide, when transformed into and co-expressed in a host cell, enhances or reduces an amount of proteolytically-cleaved eIF4A1 compared to an amount of proteolytically-cleaved eIF4A1 expressed in a host cell transformed and coexpressed with a polynucleotide encoding the control picornavirus 3C protease.

10. The isolated polynucleotide encoding the modified picornavirus 3C protease of claim 1,
wherein the one or more amino acid substitution(s) comprises substitution with a proline.

11. The isolated polynucleotide encoding the modified picornavirus 3C protease of claim 1 further comprising at least one polynucleotide sequence encoding a P1 precursor polypeptide.

12. A vector comprising the isolated polynucleotide sequence encoding the modified picornavirus 3C protease claim 1.

13. A host cell comprising the vector of claim 12.

14. A composition comprising a the polynucleotide or vector encoding the modified picornavirus 3C protease of claim 1 and a pharmaceutically acceptable excipient, adjuvant, buffer or solution suitable for proteolysis by said modified picornavirus 3C protease.

15. A method for processing a picornavirus P1 precursor polypeptide into picornavirus viral proteins and/or Virus-Like Particles (VLPs), which method comprises:
culturing the host cell of claim 13 in a suitable medium; and
recovering at least one viral protein selected from among VP0, VP1, VP2, VP3 and VP4 and/or VLPs.

16. The isolated polynucleotide of claim 1, wherein the alignment is determined with Clone Manager 9, Version 9.4, 1 Jan. 2015, with Blossum 62 with default parameters.

17. The isolated polynucleotide of claim 1, wherein the one or more amino acid substitutions are non-conservative substitutions.

18. The isolated polynucleotide of claim 1, wherein the one or more amino acid substitution(s) are located at one or more amino acid position(s) corresponding to positions 16-25 of a wild-type Foot-and-Mouth Disease Virus (FMDV) 3C protease.

19. The isolated polynucleotide of claim 1, wherein one or more amino acid substitution(s) are located at one or more amino acid position(s) corresponding to positions 99-100 of a wild-type Foot-and-Mouth Disease Virus (FMDV) 3C protease.

20. The isolated polynucleotide of claim 1, wherein one or more amino acid substitution(s) are located at one or more amino acid position(s) corresponding to positions 115-130 of a wild-type Foot-and-Mouth Disease Virus (FMDV) 3C protease.

The application's sequence listing, which the Patent Office published only in electronic form, follows.

SEQUENCE LISTING (655 sequences)

SEQ ID NO: 1 - DNA, 639 bp, Foot-and-mouth disease virus
  CDS (1)..(639)
  misc_feature (1)..(639): WT_A_2006
agtggtgcccccccgaccgacttgcaaaagatggtcatgggcaacaccaagcctgttgagctcatcctcgacgggaagacggtagccatctgttgcgctaccggagtgtttggcactgcttaccttgtgccacgtcatcttttcgcggagaagtatgacaagatcatgctggacggcagagccatgacagacagtgactacagagtgtttgagtttgagattaaagtaaaagggcaggacatgctctcagatgccgcgctcatggtgctccaccgtgggaatcgcgtgagagacatcacgaaacactttcgtgatacagcaagaatgaagaagggcacccccgttgtcggtgttatcaacaacgctgatgtcgggagactgattttctctggtgaggcccttacctacaaggacattgtagtgtgcatggatggagacaccatgcctggcctctttgcctacagagccgccaccaaggctggctattgtggaggagctgttcttgcaaaggacggagccgagaccttcatcgtcggcactcactccgcaggtggtaatggagttggatactgttcatgcgtttccaggtccatgctgctaaagatgaaggcacacatcgaccctgagccacaccacgag

SEQ ID NO: 2 - protein, 213 aa, Foot-and-mouth disease virus
SGAPPTDLQKMVMGNTKPVELILDGKTVAICCATGVFGTAYLVPRHLFAEKYDKIMLDGRAMTDSDYRVFEFEIKVKGQDMLSDAALMVLHRGNRVRDITKHFRDTARMKKGTPVVGVINNADVGRLIFSGEALTYKDIVVCMDGDTMPGLFAYRAATKAGYCGGAVLAKDGAETFIVGTHSAGGNGVGYCSCVSRSMLLKMKAHIDPEPHHE

SEQ ID NO: 3 - DNA, 639 bp, Foot-and-mouth disease virus
  CDS (1)..(639)
  misc_feature (1)..(639): WT_A24
agtggtgccccaccgaccgacttgcaaaagttggtcatgggcaacaccaagcccgttgagctcatccttgacgggaagacggtagccatttgctgtgctactggagttttcggcactgcttacctcgtgcctcgtcatcttttcgcagaaaagtacgacaagatcatgttggacggcagagccatgacagatagtgactacagagtgtttgagtttgagattaaagtaaaaggacaggacatgctctcagacgctgcgctcatggtgctccaccgtgggaatcgcgtgagagacatcacgaaacactttcgtgacacagcaagaatgaagaaaggcacccccgtcgttggtgtgatcaacaacgccgatgtcgggagactgattttctctggtgaagcccttacctacaaggacattgtagtgtgcatggatggagacaccatgcctgggctctttgcctacaaagccgcaaccaaggctggttattgcggaggagccgtcctcgctaaggacggggctgacacgttcatcgttggcacccactccgctggaggcaatggcgttggatactgctcttgcgtttccaggtccatgcttctcaagatgaaggcacacgttgaccccgaaccacaccacgag

SEQ ID NO: 4 - protein, 213 aa, Foot-and-mouth disease virus
SGAPPTDLQKLVMGNTKPVELILDGKTVAICCATGVFGTAYLVPRHLFAEKYDKIMLDGRAMTDSDYRVFEFEIKVKGQDMLSDAALMVLHRGNRVRDITKHFRDTARMKKGTPVVGVINNADVGRLIFSGEALTYKDIVVCMDGDTMPGLFAYKAATKAGYCGGAVLAKDGADTFIVGTHSAGGNGVGYCSCVSRSMLLKMKAHVDPEPHHE

SEQ ID NO: 5 - DNA, 639 bp, Foot-and-mouth disease virus
  CDS (1)..(639)
  misc_feature (1)..(639): WT_Asia_leb_89
agtggtgccccaccgaccgacttgcaaaagatggtcatgagcaacactaagcctgttgagctcatccttgacggtaagacggtggccatctgctgcgccaccggagtgtttggtactgcctacctcgtgcctcgtcaccttttcgcagaaaagtacgacaggatcatgttggacggcagggccatgacagacagtgactacagagtgtttgagtttgagattaaagtaaaaggacaggacatgctctcagacgctgcgctcatggtgctccaccgtggcaaccgtgtgagagacatcacgaaacactttcgtgatacagcaagaatgaagaaaggtacccccgttgtcggcgtgatcaacaacgccgacgttgggagactgattttctccggtgaggccctcacctacaaggacattgtagtgtgcatggatggagacaccatgccgggcctatttgcctacagagccgctaccaaggctggctactgtggaggagccgttcttgccaaggacggagctgacacatttatcgtcggcactcactccgcaggaggcaatggagtcgggtactgctcatgcgtatctaggtccatgctcttgaagatgaaggcacacattgaccccgaaccacaccacgag

SEQ ID NO: 6 - protein, 213 aa, Foot-and-mouth disease virus
SGAPPTDLQKMVMSNTKPVELILDGKTVAICCATGVFGTAYLVPRHLFAEKYDRIMLDGRAMTDSDYRVFEFEIKVKGQDMLSDAALMVLHRGNRVRDITKHFRDTARMKKGTPVVGVINNADVGRLIFSGEALTYKDIVVCMDGDTMPGLFAYRAATKAGYCGGAVLAKDGADTFIVGTHSAGGNGVGYCSCVSRSMLLKMKAHIDPEPHHE

SEQ ID NO: 7 - DNA, 639 bp, Foot-and-mouth disease virus
  CDS (1)..(639)
  misc_feature (1)..(639): WT_Asia1_Shamir
agtggtgccccaccgaccgacttgcaaaagatggtcatgagcaacactaagcctgttgagctcatccttgacggtaagacggtggccatctgctgcgccaccggagtgtttggtactgcctacctcgtgcctcgtcaccttttcgcagaaaagtacgacaggatcatgttggacggcagggccatgacagacagtgactacagagtgtttgagtttgagattaaagtaaaaggacaggacatgctctcagacgctgcgctcatggtgctccaccgtggcaaccgtgtgagagacatcacgaaacactttcgtgatacagcaagaatgaagaaaggtacccccgttgtcggcgtgatcaacaacgccgacgttgggagattgattttctccggtgaggccctcacctacaaggacattgtagtgtgcatggatggagacaccatgccgggcctatttgcctacagagccgctaccaaggctggctactgtggaggagccgttcttgccaaggacggagctgacacatttatcgtcggcactcactccgcaggaggcaatggagtcgggtactgctcatgcgtatctaggtccatgctcttgaagatgaaggcacacattgaccccgaaccacaccacgag

SEQ ID NO: 8 - protein, 213 aa, Foot-and-mouth disease virus; identical to SEQ ID NO: 6

SEQ ID NO: 9 - DNA, 639 bp, Foot-and-mouth disease virus
  CDS (1)..(639): WT_C3
  misc_feature (1)..(639): WT_C3
agcggtgccccaccgaccgacttgcaaaagatggtcatgggcaacaccaagcctgttgagctgattctcgatgggaagacggtggccatctgctgcgccaccggagtgtttggcactgcttacctcgtgccgcgtcatcttttcgcagagaagtatgacaagatcatgttggacggcagagccatgacagacagtgactacagagtgtttgagtttgagattaaagtaaaaggacaggacatgctctcggacgccgcactcatggtgctacaccgtgggaatcgcgtgagagacatcacgaagcactttcgtgacacagcaagaatgaagaaaggcacccccgtcgtaggcgtgattaacaacgccgacgttgggagactgattttctctggtgaggcccttacctacaaagacattgtggtgtgcatggatggagacaccatgcctggcctctttgcctacagagccgccaccaaggctggttactgtggaggagccgtccttgccaaggatggagctgacacattcatcgtcggcactcactctgctggaggcaatggagttggttactgctcatgcgtttccagatccatgcttctcaagatgaaggcacacattgaccctgagccacaccacgag

SEQ ID NO: 10 - protein, 213 aa, Foot-and-mouth disease virus
SGAPPTDLQKMVMGNTKPVELILDGKTVAICCATGVFGTAYLVPRHLFAEKYDKIMLDGRAMTDSDYRVFEFEIKVKGQDMLSDAALMVLHRGNRVRDITKHFRDTARMKKGTPVVGVINNADVGRLIFSGEALTYKDIVVCMDGDTMPGLFAYRAATKAGYCGGAVLAKDGADTFIVGTHSAGGNGVGYCSCVSRSMLLKMKAHIDPEPHHE

SEQ ID NO: 11 - DNA, 639 bp, Foot-and-mouth disease virus
  CDS (1)..(639)
  misc_feature (1)..(639): WT_O_pan_asia
agtggtgctccaccgactgacttgcaaaagatggtcatgggtaacaccaagcccgttgagctcatacttgacgggaagacagtagccatctgctgtgctactggagtgtttggcaccgcctacctcgtgcctcgtcatcttttcgcagagaagtatgacaagatcatgttggacggcagagccatgacagacagtgactacagagtgtttgagtttgagattaaagtaaaaggacaggacatgctctcagacgccgcgctcatggtgctccaccgtgggaatcgcgtgcgggacatcacgaaacacttccgtgatgtggcaagaatgaagaaaggaacccccgtcgttggtgttatcaacaacgccgatgtcgggagactgattttctctggtgaggccctcacctacaaggacattgtagtgtgcatggatggagacaccatgcctggcctctttgcctacaaggccgccaccaaggccggctactgtggaggagccgttctcgcaaaggacggagccgagactttcatcgtcggcacacactctgcgggcggcaacggagttggatactgctcctgcgtgtccaggtccatgctgctcaagatgaaggcacacatagatcctgaaccacaccatgaa

SEQ ID NO: 12 - protein, 213 aa, Foot-and-mouth disease virus
SGAPPTDLQKMVMGNTKPVELILDGKTVAICCATGVFGTAYLVPRHLFAEKYDKIMLDGRAMTDSDYRVFEFEIKVKGQDMLSDAALMVLHRGNRVRDITKHFRDVARMKKGTPVVGVINNADVGRLIFSGEALTYKDIVVCMDGDTMPGLFAYKAATKAGYCGGAVLAKDGAETFIVGTHSAGGNGVGYCSCVSRSMLLKMKAHIDPEPHHE

SEQ ID NO: 13 - DNA, 639 bp, Foot-and-mouth disease virus
  CDS (1)..(639)
  misc_feature (1)..(639): WT_O1_Manissa
agtggtgccccaccgaccgacttgcagaagatggtcatgggcaacactaagcctgttgagctcatcctcgacgggaagacggtagccatctgctgtgctaccggagtgtttggcactgcctacctcgtacctcgtcacctcttcgcggagaagtacgacaagataatgttggacggtagagccatgacagacagtgactacagagtgtttgagtttgagattaaagtaaaaggacaggacatgctctcagacgctgcactcatggtgcttcaccgtgggaaccgcgtgagagacatcacgaaacattttcgtgacacagcaagaatgaagaaaggcacccccgttgtcggtgtgatcaacaacgccgacgttgggagactgattttctctggagaggcccttacctacaaagacattgtagtgtgcatggatggagacaccatgccgggcctgtttgcctacagagccgccaccaaggctggttactgcgggggagccgttctcgccaaggacggagccgacacattcatcgttggcactcactccgcaggtggtaacggagttggatactgctcgtgcgtgtccaggtccatgctcctgaaaatgaaggcacacattgaccctgaaccacaccacgag

SEQ ID NO: 14 - protein, 213 aa, Foot-and-mouth disease virus; identical to SEQ ID NO: 10

SEQ ID NO: 15 - DNA, 639 bp, Foot-and-mouth disease virus
  CDS (1)..(639)
  misc_feature (1)..(639): WT_SAT1
agcggatgtccaccgaccgacctgcagaggatggtcatggcaaacgtgaaacccgttgagctcatcctcgatgggaagaccgttgcgctctgctgcgctacgggagtgttcgggacggcttatctcgtgcctcgtcatcttttcgcagagaagtacgacaagatcatgctggacggccgtgccctgacagacagtgacttcagagtgtttgagtttgaggtgaaagtaaaaggacaggacatgctctcagatgccgcgctcatggttctccactccggaaaccgtgtgcgcgatctcacgggacacttccgtgacacaatgaaactgtcgaaaggcagtcccgtcgttggtgtggtcaacaacgccgacgtcggaagactcatcttctcaggagacgcactgacctacaaagacctggtcgtttgtatggacggtgacaccatgcccggactcttcgcataccgcgcggggaccaaggttggttattgtggagcagccgttcttgcaaaagacggcgccaagactgtgatcgtcggcacccactcagccggtggcaacggagtaggctactgctcctgtgtctcacgatccatgctcctgcagatgaaagcccacatcgacccggccccccacaccgag

SEQ ID NO: 16 - protein, 213 aa, Foot-and-mouth disease virus
SGCPPTDLQRMVMANVKPVELILDGKTVALCCATGVFGTAYLVPRHLFAEKYDKIMLDGRALTDSDFRVFEFEVKVKGQDMLSDAALMVLHSGNRVRDLTGHFRDTMKLSKGSPVVGVVNNADVGRLIFSGDALTYKDLVVCMDGDTMPGLFAYRAGTKVGYCGAAVLAKDGAKTVIVGTHSAGGNGVGYCSCVSRSMLLQMKAHIDPAPHTE

SEQ ID NO: 17 - DNA, 639 bp, Foot-and-mouth disease virus
  CDS (1)..(639)
  misc_feature (1)..(639): WT_SAT2_Egypt_2010
agtggagcgccacccaccgacttgcaaaagatggtgatggccaacaccaaaccagtcgagctcatactcgatggtaagacagtggcgatctgctgtgccactggagtgtttgggactgcctatctcgtgcctcgtcatcttttcgctgagaagtatgacaagatcatgattgacggcagggccatgacagaccgtgatttcagagtgtttgagtttgagattaaagtaaaaggacaggacatgctctcggacgccgccctcatggtgctgcaccgtgggaaccgcgtgagagacatcacgaagcactttcgtgatcaagcaagaatgagaaaaggaacccccgtggttggcgtgatcaacaacgccgacgttgggagactcatcttctctggagaggcactcacctacaaagacattgtagtgtgtatggatggcgacaccatgccaggcctctttgcctataaagccgccaccaaagctggctactgtggaggagccgttcttgcgaaagacggagccgagactttcatcgtcggcactcactccgctggaggaaacggagttggttactgctcttgcgtttccaagtccatgctcctgcaaatgaaggcacacattgatcctgaaccacaccacgaa

SEQ ID NO: 18 - protein, 213 aa, Foot-and-mouth disease virus
SGAPPTDLQKMVMANTKPVELILDGKTVAICCATGVFGTAYLVPRHLFAEKYDKIMIDGRAMTDRDFRVFEFEIKVKGQDMLSDAALMVLHRGNRVRDITKHFRDQARMRKGTPVVGVINNADVGRLIFSGEALTYKDIVVCMDGDTMPGLFAYKAATKAGYCGGAVLAKDGAETFIVGTHSAGGNGVGYCSCVSKSMLLQMKAHIDPEPHHE

SEQ ID NO: 19 - DNA, 639 bp, Foot-and-mouth disease virus
  CDS (1)..(639)
  misc_feature (1)..(639): WT_SAT3
agcggatgcccaccgaccgacttgcaaaagatggtcatggcaaacgtaaagcctgttgagctcatcctcgacgggaagaccgttgcgctctgctgcgcgacgggagtgtttgggacagcttacctcgtgccccgtcatcttttcgcagagaagtatgacaagatcatgctggacggccgcgccctgacagacagtgactttagagtgtttgagtttgaggtgaaagtaaaaggacaggacatgctctctgatgccgcactcatggttctccactctggaaaccgtgtgcgcgatctcacgggacacttccgtgacaccatgaaactgtcgaaaggcagccccgtcgttggtgttgtcaacaacgctgatgtcggaagactcatcttctcaggagacgcactgacctacaaagacctggtcgtttgtatggacggtgataccatgcctggactcttcgcttaccgcgcagggaccaaggttggatactgcggagctgccgttctcgcaaaggacggcgccaagactgtgatcgttggcacccactcagccggaggcaacggagtgggctactgctcctgcgtctcacgatccatgctcctgcagatgaaggcccacattgatccggctcctcacaccgag

SEQ ID NO: 20 - protein, 213 aa, Foot-and-mouth disease virus
SGCPPTDLQKMVMANVKPVELILDGKTVALCCATGVFGTAYLVPRHLFAEKYDKIMLDGRALTDSDFRVFEFEVKVKGQDMLSDAALMVLHSGNRVRDLTGHFRDTMKLSKGSPVVGVVNNADVGRLIFSGDALTYKDLVVCMDGDTMPGLFAYRAGTKVGYCGAAVLAKDGAKTVIVGTHSAGGNGVGYCSCVSRSMLLQMKAHIDPAPHTE

SEQ ID NO: 21 - DNA, 639 bp, Foot-and-mouth disease virus
  CDS (1)..(639)
  misc_feature (1)..(639): n is c, g, a, t/u
  misc_feature (1)..(639): D123P_A_2006
agtggtgcccccccgaccgacttgcaaaagatggtcatgggcaacaccaagcctgttgagctcatcctcgacgggaagacggtagccatctgttgcgctaccggagtgtttggcactgcttaccttgtgccacgtcatcttttcgcggagaagtatgacaagatcatgctggacggcagagccatgacagacagtgactacagagtgtttgagtttgagattaaagtaaaagggcaggacatgctctcagatgccgcgctcatggtgctccaccgtgggaatcgcgtgagagacatcacgaaacactttcgtgatacagcaagaatgaagaagggcacccccgttgtcggtgttatcaacaacgctccngtcgggagactgattttctctggtgaggcccttacctacaaggacattgtagtgtgcatggatggagacaccatgcctggcctctttgcctacagagccgccaccaaggctggctattgtggaggagctgttcttgcaaaggacggagccgagaccttcatcgtcggcactcactccgcaggtggtaatggagttggatactgttcatgcgtttccaggtccatgctgctaaagatgaaggcacacatcgaccctgagccacaccacgag

SEQ ID NO: 22 - protein, 213 aa, Foot-and-mouth disease virus
SGAPPTDLQKMVMGNTKPVELILDGKTVAICCATGVFGTAYLVPRHLFAEKYDKIMLDGRAMTDSDYRVFEFEIKVKGQDMLSDAALMVLHRGNRVRDITKHFRDTARMKKGTPVVGVINNAPVGRLIFSGEALTYKDIVVCMDGDTMPGLFAYRAATKAGYCGGAVLAKDGAETFIVGTHSAGGNGVGYCSCVSRSMLLKMKAHIDPEPHHE

SEQ ID NO: 23 - DNA, 639 bp, Foot-and-mouth disease virus
  CDS (1)..(639)
  misc_feature (1)..(639): n is c, g, a, t/u
  misc_feature (1)..(639): D123P_A24
agtggtgccccaccgaccgacttgcaaaagttggtcatgggcaacaccaagcccgttgagctcatccttgacgggaagacggtagccatttgctgtgctactggagttttcggcactgcttacctcgtgcctcgtcatcttttcgcagaaaagtacgacaagatcatgttggacggcagagccatgacagatagtgactacagagtgtttgagtttgagattaaagtaaaaggacaggacatgctctcagacgctgcgctcatggtgctccaccgtgggaatcgcgtgagagacatcacgaaacactttcgtgacacagcaagaatgaagaaaggcacccccgtcgttggtgtgatcaacaacgccccngtcgggagactgattttctctggtgaagcccttacctacaaggacattgtagtgtgcatggatggagacaccatgcctgggctctttgcctacaaagccgcaaccaaggctggttattgcggaggagccgtcctcgctaaggacggggctgacacgttcatcgttggcacccactccgctggaggcaatggcgttggatactgctcttgcgtttccaggtccatgcttctcaagatgaaggcacacgttgaccccgaaccacaccacgag

SEQ ID NO: 24 - protein, 213 aa, Foot-and-mouth disease virus
SGAPPTDLQKLVMGNTKPVELILDGKTVAICCATGVFGTAYLVPRHLFAEKYDKIMLDGRAMTDSDYRVFEFEIKVKGQDMLSDAALMVLHRGNRVRDITKHFRDTARMKKGTPVVGVINNAPVGRLIFSGEALTYKDIVVCMDGDTMPGLFAYKAATKAGYCGGAVLAKDGADTFIVGTHSAGGNGVGYCSCVSRSMLLKMKAHVDPEPHHE

SEQ ID NO: 25 - DNA, 639 bp, Foot-and-mouth disease virus
  CDS (1)..(639)
  misc_feature (1)..(639): n is c, g, a, t/u
  misc_feature (1)..(639): D123P_Asia_leb_89
agtggtgccccaccgaccgacttgcaaaagatggtcatgagcaacactaagcctgttgagctcatccttgacggtaagacggtggccatctgctgcgccaccggagtgtttggtactgcctacctcgtgcctcgtcaccttttcgcagaaaagtacgacaggatcatgttggacggcagggccatgacagacagtgactacagagtgtttgagtttgagattaaagtaaaaggacaggacatgctctcagacgctgcgctcatggtgctccaccgtggcaaccgtgtgagagacatcacgaaacactttcgtgatacagcaagaatgaagaaaggtacccccgttgtcggcgtgatcaacaacgccccngttgggagactgattttctccggtgaggccctcacctacaaggacattgtagtgtgcatggatggagacaccatgccgggcctatttgcctacagagccgctaccaaggctggctactgtggaggagccgttcttgccaaggacggagctgacacatttatcgtcggcactcactccgcaggaggcaatggagtcgggtactgctcatgcgtatctaggtccatgctcttgaagatgaaggcacacattgaccccgaaccacaccacgag

SEQ ID NO: 26 - protein, 213 aa, Foot-and-mouth disease virus
SGAPPTDLQKMVMSNTKPVELILDGKTVAICCATGVFGTAYLVPRHLFAEKYDRIMLDGRAMTDSDYRVFEFEIKVKGQDMLSDAALMVLHRGNRVRDITKHFRDTARMKKGTPVVGVINNAPVGRLIFSGEALTYKDIVVCMDGDTMPGLFAYRAATKAGYCGGAVLAKDGADTFIVGTHSAGGNGVGYCSCVSRSMLLKMKAHIDPEPHHE

SEQ ID NO: 27 - DNA, 639 bp, Foot-and-mouth disease virus
  CDS (1)..(639)
  misc_feature (1)..(639): n is c, g, a, t/u
  misc_feature (1)..(639): D123P_Asia1_Shamir
agtggtgccccaccgaccgacttgcaaaagatggtcatgagcaacactaagcctgttgagctcatccttgacggtaagacggtggccatctgctgcgccaccggagtgtttggtactgcctacctcgtgcctcgtcaccttttcgcagaaaagtacgacaggatcatgttggacggcagggccatgacagacagtgactacagagtgtttgagtttgagattaaagtaaaaggacaggacatgctctcagacgctgcgctcatggtgctccaccgtggcaaccgtgtgagagacatcacgaaacactttcgtgatacagcaagaatgaagaaaggtacccccgttgtcggcgtgatcaacaacgccccngttgggagattgattttctccggtgaggccctcacctacaaggacattgtagtgtgcatggatggagacaccatgccgggcctatttgcctacagagccgctaccaaggctggctactgtggaggagccgttcttgccaaggacggagctgacacatttatcgtcggcactcactccgcaggaggcaatggagtcgggtactgctcatgcgtatctaggtccatgctcttgaagatgaaggcacacattgaccccgaaccacaccacgag

SEQ ID NO: 28 - protein, 213 aa, Foot-and-mouth disease virus; identical to SEQ ID NO: 26

SEQ ID NO: 29 - DNA, 639 bp, Foot-and-mouth disease virus
  CDS (1)..(639)
  misc_feature (1)..(639): n is c, g, a, t/u
  misc_feature (1)..(639): D123P_C3
agcggtgccccaccgaccgacttgcaaaagatggtcatgggcaacaccaagcctgttgagctgattctcgatgggaagacggtggccatctgctgcgccaccggagtgtttggcactgcttacctcgtgccgcgtcatcttttcgcagagaagtatgacaagatcatgttggacggcagagccatgacagacagtgactacagagtgtttgagtttgagattaaagtaaaaggacaggacatgctctcggacgccgcactcatggtgctacaccgtgggaatcgcgtgagagacatcacgaagcactttcgtgacacagcaagaatgaagaaaggcacccccgtcgtaggcgtgattaacaacgccccngttgggagactgattttctctggtgaggcccttacctacaaagacattgtggtgtgcatggatggagacaccatgcctggcctctttgcctacagagccgccaccaaggctggttactgtggaggagccgtccttgccaaggatggagctgacacattcatcgtcggcactcactctgctggaggcaatggagttggttactgctcatgcgtttccagatccatgcttctcaagatgaaggcacacattgaccctgagccacaccacgag

SEQ ID NO: 30 - protein, 213 aa, Foot-and-mouth disease virus
SGAPPTDLQKMVMGNTKPVELILDGKTVAICCATGVFGTAYLVPRHLFAEKYDKIMLDGRAMTDSDYRVFEFEIKVKGQDMLSDAALMVLHRGNRVRDITKHFRDTARMKKGTPVVGVINNAPVGRLIFSGEALTYKDIVVCMDGDTMPGLFAYRAATKAGYCGGAVLAKDGADTFIVGTHSAGGNGVGYCSCVSRSMLLKMKAHIDPEPHHE

SEQ ID NO: 31 - DNA, 639 bp, Foot-and-mouth disease virus
  CDS (1)..(639)
  misc_feature (1)..(639): n is c, g, a, t/u
  misc_feature (1)..(639): D123P_O_pan_asia
agtggtgctccaccgactgacttgcaaaagatggtcatgggtaacaccaagcccgttgagctcatacttgacgggaagacagtagccatctgctgtgctactggagtgtttggcaccgcctacctcgtgcctcgtcatcttttcgcagagaagtatgacaagatcatgttggacggcagagccatgacagacagtgactacagagtgtttgagtttgagattaaagtaaaaggacaggacatgctctcagacgccgcgctcatggtgctccaccgtgggaatcgcgtgcgggacatcacgaaacacttccgtgatgtggcaagaatgaagaaaggaacccccgtcgttggtgttatcaacaacgccccngtcgggagactgattttctctggtgaggccctcacctacaaggacattgtagtgtgcatggatggagacaccatgcctggcctctttgcctacaaggccgccaccaaggccggctactgtggaggagccgttctcgcaaaggacggagccgagactttcatcgtcggcacacactctgcgggcggcaacggagttggatactgctcctgcgtgtccaggtccatgctgctcaagatgaaggcacacatagatcctgaaccacaccatgaa

SEQ ID NO: 32 - protein, 213 aa, Foot-and-mouth disease virus
SGAPPTDLQKMVMGNTKPVELILDGKTVAICCATGVFGTAYLVPRHLFAEKYDKIMLDGRAMTDSDYRVFEFEIKVKGQDMLSDAALMVLHRGNRVRDITKHFRDVARMKKGTPVVGVINNAPVGRLIFSGEALTYKDIVVCMDGDTMPGLFAYKAATKAGYCGGAVLAKDGAETFIVGTHSAGGNGVGYCSCVSRSMLLKMKAHIDPEPHHE

SEQ ID NO: 33 - DNA, 639 bp, Foot-and-mouth disease virus
  CDS (1)..(639)
  misc_feature (1)..(639): n is c, g, a, t/u
  misc_feature (1)..(639): D123P_O1_Manissa
agtggtgccccaccgaccgacttgcagaagatggtcatgggcaacactaagcctgttgagctcatcctcgacgggaagacggtagccatctgctgtgctaccggagtgtttggcactgcctacctcgtacctcgtcacctcttcgcggagaagtacgacaagataatgttggacggtagagccatgacagacagtgactacagagtgtttgagtttgagattaaagtaaaaggacaggacatgctctcagacgctgcactcatggtgcttcaccgtgggaaccgcgtgagagacatcacgaaacattttcgtgacacagcaagaatgaagaaaggcacccccgttgtcggtgtgatcaacaacgccccngttgggagactgattttctctggagaggcccttacctacaaagacattgtagtgtgcatggatggagacaccatgccgggcctgtttgcctacagagccgccaccaaggctggttactgcgggggagccgttctcgccaaggacggagccgacacattcatcgttggcactcactccgcaggtggtaacggagttggatactgctcgtgcgtgtccaggtccatgctcctgaaaatgaaggcacacattgaccctgaaccacaccacgag

SEQ ID NO: 34 - protein, 213 aa, Foot-and-mouth disease virus; identical to SEQ ID NO: 30

SEQ ID NO: 35 - DNA, 639 bp, Foot-and-mouth disease virus
  CDS (1)..(639)
  misc_feature (1)..(639): n is c, g, a, t/u
  misc_feature (1)..(639): D123P_SAT1
agcggatgtccaccgaccgacctgcagaggatggtcatggcaaacgtgaaacccgttgagctcatcctcgatgggaagaccgttgcgctctgctgcgctacgggagtgttcgggacggcttatctcgtgcctcgtcatcttttcgcagagaagtacgacaagatcatgctggacggccgtgccctgacagacagtgacttcagagtgtttgagtttgaggtgaaagtaaaaggacaggacatgctctcagatgccgcgctcatggttctccactccggaaaccgtgtgcgcgatctcacgggacacttccgtgacacaatgaaactgtcgaaaggcagtcccgtcgttggtgtggtcaacaacgccccngtcggaagactcatcttctcaggagacgcactgacctacaaagacctggtcgtttgtatggacggtgacaccatgcccggactcttcgcataccgcgcggggaccaaggttggttattgtggagcagccgttcttgcaaaagacggcgccaagactgtgatcgtcggcacccactcagccggtggcaacggagtaggctactgctcctgtgtctcacgatccatgctcctgcagatgaaagcccacatcgacccggccccccacaccgag

SEQ ID NO: 36 - protein, 213 aa, Foot-and-mouth disease virus
SGCPPTDLQRMVMANVKPVELILDGKTVALCCATGVFGTAYLVPRHLFAEKYDKIMLDGRALTDSDFRVFEFEVKVKGQDMLSDAALMVLHSGNRVRDLTGHFRDTMKLSKGSPVVGVVNNAPVGRLIFSGDALTYKDLVVCMDGDTMPGLFAYRAGTKVGYCGAAVLAKDGAKTVIVGTHSAGGNGVGYCSCVSRSMLLQMKAHIDPAPHTE

SEQ ID NO: 37 - DNA, 639 bp, Foot-and-mouth disease virus
  CDS (1)..(639)
  misc_feature (1)..(639): n is c, g, a, t/u
  misc_feature (1)..(639): D123P_SAT2_Egypt_2010
agtggagcgccacccaccgacttgcaaaagatggtgatggccaacaccaaaccagtcgagctcatactcgatggtaagacagtggcgatctgctgtgccactggagtgtttgggactgcctatctcgtgcctcgtcatcttttcgctgagaagtatgacaagatcatgattgacggcagggccatgacagaccgtgatttcagagtgtttgagtttgagattaaagtaaaaggacaggacatgctctcggacgccgccctcatggtgctgcaccgtgggaaccgcgtgagagacatcacgaagcactttcgtgatcaagcaagaatgagaaaaggaacccccgtggttggcgtgatcaacaacgccccngttgggagactcatcttctctggagaggcactcacctacaaagacattgtagtgtgtatggatggcgacaccatgccaggcctctttgcctataaagccgccaccaaagctggctactgtggaggagccgttcttgcgaaagacggagccgagactttcatcgtcggcactcactccgctggaggaaacggagttggttactgctcttgcgtttccaagtccatgctcctgcaaatgaaggcacacattgatcctgaaccacaccacgaa

SEQ ID NO: 38 - protein, 213 aa, Foot-and-mouth disease virus
SGAPPTDLQKMVMANTKPVELILDGKTVAICCATGVFGTAYLVPRHLFAEKYDKIMIDGRAMTDRDFRVFEFEIKVKGQDMLSDAALMVLHRGNRVRDITKHFRDQARMRKGTPVVGVINNAPVGRLIFSGEALTYKDIVVCMDGDTMPGLFAYKAATKAGYCGGAVLAKDGAETFIVGTHSAGGNGVGYCSCVSKSMLLQMKAHIDPEPHHE

SEQ ID NO: 39 - DNA, 639 bp, Foot-and-mouth disease virus
  CDS (1)..(639)
  misc_feature (1)..(639): n is c, g, a, t/u
  misc_feature (1)..(639): D123P_SAT3
agcggatgcccaccgaccgacttgcaaaagatggtcatggcaaacgtaaagcctgttgagctcatcctcgacgggaagaccgttgcgctctgctgcgcgacgggagtgtttgggacagcttacctcgtgccccgtcatcttttcgcagagaagtatgacaagatcatgctggacggccgcgccctgacagacagtgactttagagtgtttgagtttgaggtgaaagtaaaaggacaggacatgctctctgatgccgcactcatggttctccactctggaaaccgtgtgcgcgatctcacgggacacttccgtgacaccatgaaactgtcgaaaggcagccccgtcgttggtgttgtcaacaacgctccngtcggaagactcatcttctcaggagacgcactgacctacaaagacctggtcgtttgtatggacggtgataccatgcctggactcttcgcttaccgcgcagggaccaaggttggatactgcggagctgccgttctcgcaaaggacggcgccaagactgtgatcgttggcacccactcagccggaggcaacggagtgggctactgctcctgcgtctcacgatccatgctcctgcagatgaaggcccacattgatccggctcctcacaccgag

SEQ ID NO: 40 - protein, 213 aa, Foot-and-mouth disease virus
SGCPPTDLQKMVMANVKPVELILDGKTVALCCATGVFGTAYLVPRHLFAEKYDKIMLDGRALTDSDFRVFEFEVKVKGQDMLSDAALMVLHSGNRVRDLTGHFRDTMKLSKGSPVVGVVNNAPVGRLIFSGDALTYKDLVVCMDGDTMPGLFAYRAGTKVGYCGAAVLAKDGAKTVIVGTHSAGGNGVGYCSCVSRSMLLQMKAHIDPAPHTE

SEQ ID NO: 41 - DNA, 639 bp, Foot-and-mouth disease virus
  CDS (1)..(639)
  misc_feature (1)..(639): n is c, g, a, t/u
  misc_feature (1)..(639): G125P_A_2006
agtggtgcccccccgaccgacttgcaaaagatggtcatgggcaacaccaagcctgttgagctcatcctcgacgggaagacggtagccatctgttgcgctaccggagtgtttggcactgcttaccttgtgccacgtcatcttttcgcggagaagtatgacaagatcatgctggacggcagagccatgacagacagtgactacagagtgtttgagtttgagattaaagtaaaagggcaggacatgctctcagatgccgcgctcatggtgctccaccgtgggaatcgcgtgagagacatcacgaaacactttcgtgatacagcaagaatgaagaagggcacccccgttgtcggtgttatcaacaacgctgatgtcccnagactgattttctctggtgaggcccttacctacaaggacattgtagtgtgcatggatggagacaccatgcctggcctctttgcctacagagccgccaccaaggctggctattgtggaggagctgttcttgcaaaggacggagccgagaccttcatcgtcggcactcactccgcaggtggtaatggagttggatactgttcatgcgtttccaggtccatgctgctaaagatgaaggcacacatcgaccctgagccacaccacgag

SEQ ID NO: 42 - protein, 213 aa, Foot-and-mouth disease virus
SGAPPTDLQKMVMGNTKPVELILDGKTVAICCATGVFGTAYLVPRHLFAEKYDKIMLDGRAMTDSDYRVFEFEIKVKGQDMLSDAALMVLHRGNRVRDITKHFRDTARMKKGTPVVGVINNADVPRLIFSGEALTYKDIVVCMDGDTMPGLFAYRAATKAGYCGGAVLAKDGAETFIVGTHSAGGNGVGYCSCVSRSMLLKMKAHIDPEPHHE

SEQ ID NO: 43 - DNA, 639 bp, Foot-and-mouth disease virus
  CDS (1)..(639)
  misc_feature (1)..(639): n is c, g, a, t/u
  misc_feature (1)..(639): G125P_A24
agtggtgccccaccgaccgacttgcaaaagttggtcatgggcaacaccaagcccgttgagctcatccttgacgggaagacggtagccatttgctgtgctactggagttttcggcactgcttacctcgtgcctcgtcatcttttcgcagaaaagtacgacaagatcatgttggacggcagagccatgacagatagtgactacagagtgtttgagtttgagattaaagtaaaaggacaggacatgctctcagacgctgcgctcatggtgctccaccgtgggaatcgcgtgagagacatcacgaaacactttcgtgacacagcaagaatgaagaaaggcacccccgtcgttggtgtgatcaacaacgccgatgtcccnagactgattttctctggtgaagcccttacctacaaggacattgtagtgtgcatggatggagacaccatgcctgggctctttgcctacaaagccgcaaccaaggctggttattgcggaggagccgtcctcgctaaggacggggctgacacgttcatcgttggcacccactccgctggaggcaatggcgttggatactgctcttgcgtttccaggtccatgcttctcaagatgaaggcacacgttgaccccgaaccacaccacgag

SEQ ID NO: 44 - protein, 213 aa, Foot-and-mouth disease virus
SGAPPTDLQKLVMGNTKPVELILDGKTVAICCATGVFGTAYLVPRHLFAEKYDKIMLDGRAMTDSDYRVFEFEIKVKGQDMLSDAALMVLHRGNRVRDITKHFRDTARMKKGTPVVGVINNADVPRLIFSGEALTYKDIVVCMDGDTMPGLFAYKAATKAGYCGGAVLAKDGADTFIVGTHSAGGNGVGYCSCVSRSMLLKMKAHVDPEPHHE

SEQ ID NO: 45 - DNA, 639 bp, Foot-and-mouth disease virus
  CDS (1)..(639)
  misc_feature (1)..(639)
  misc_feature (1)..(639): G125P_Asia_leb_89
agtggtgccccaccgaccgacttgcaaaagatggtcatgagcaacactaagcctgttgagctcatccttgacggtaagacggtggccatctgctgcgccaccggagtgtttggtactgcctacctcgtgcctcgtcaccttttcgcagaaaagtacgacaggatcatgttggacggcagggccatgacagacagtgactacagagtgtttgagtttgagattaaagtaaaaggacaggacatgctctcagacgctgcgctcatggtgctccaccgtggcaaccgtgtgagagacatcacgaaacactttcgtgatacagcaagaatgaagaaaggtacccccgttgtcggcgtgatcaacaacgccgacgttccnagactgattttctccggtgaggccctcacctacaaggacattgtagtgtgcatggatggagacaccatgccgggcctatttgcctacagagccgctaccaaggctggctactgtggaggagccgttcttgccaaggacggagctgacacatttatcgtcggcactcactccgcaggaggcaatggagtcgggtactgctcatgcgtatctaggtccatgctcttgaagatgaaggcacacattgaccccgaaccacaccacgag

SEQ ID NO: 46 - protein, 213 aa, Foot-and-mouth disease virus
SGAPPTDLQKMVMSNTKPVELILDGKTVAICCATGVFGTAYLVPRHLFAEKYDRIMLDGRAMTDSDYRVFEFEIKVKGQDMLSDAALMVLHRGNRVRDITKHFRDTARMKKGTPVVGVINNADVPRLIFSGEALTYKDIVVCMDGDTMPGLFAYRAATKAGYCGGAVLAKDGADTFIVGTHSAGGNGVGYCSCVSRSMLLKMKAHIDPEPHHE

SEQ ID NO: 47 - DNA, 639 bp, Foot-and-mouth disease virus
  CDS (1)..(639)
  misc_feature (1)..(639): n is c, g, a, t/u
  misc_feature (1)..(639): G125P_Asia1_Shamir
agtggtgccccaccgaccgacttgcaaaagatggtcatgagcaacactaagcctgttgagctcatccttgacggtaagacggtggccatctgctgcgccaccggagtgtttggtactgcctacctcgtgcctcgtcaccttttcgcagaaaagtacgacaggatcatgttggacggcagggccatgacagacagtgactacagagtgtttgagtttgagattaaagtaaaaggacaggacatgctctcagacgctgcgctcatggtgctccaccgtggcaaccgtgtgagagacatcacgaaacactttcgtgatacagcaagaatgaagaaaggtacccccgttgtcggcgtgatcaacaacgccgacgttccnagattgattttctccggtgaggccctcacctacaaggacattgtagtgtgcatggatggagacaccatgccgggcctatttgcctacagagccgctaccaaggctggctactgtggaggagccgttcttgccaaggacggagctgacacatttatcgtcggcactcactccgcaggaggcaatggagtcgggtactgctcatgcgtatctaggtccatgctcttgaagatgaaggcacacattgaccccgaaccacaccacgag

SEQ ID NO: 48 - protein, 213 aa, Foot-and-mouth disease virus; identical to SEQ ID NO: 46

SEQ ID NO: 49 - DNA, 639 bp, Foot-and-mouth disease virus
  CDS (1)..(639)
  misc_feature (1)..(639): n is c, g, a, t/u
  misc_feature (1)..(639): G125P_C3
agcggtgccccaccgaccgacttgcaaaagatggtcatgggcaacaccaagcctgttgagctgattctcgatgggaagacggtggccatctgctgcgccaccggagtgtttggcactgcttacctcgtgccgcgtcatcttttcgcagagaagtatgacaagatcatgttggacggcagagccatgacagacagtgactacagagtgtttgagtttgagattaaagtaaaaggacaggacatgctctcggacgccgcactcatggtgctacaccgtgggaatcgcgtgagagacatcacgaagcactttcgtgacacagcaagaatgaagaaaggcacccccgtcgtaggcgtgattaacaacgccgacgttccnagactgattttctctggtgaggcccttacctacaaagacattgtggtgtgcatggatggagacaccatgcctggcctctttgcctacagagccgccaccaaggctggttactgtggaggagccgtccttgccaaggatggagctgacacattcatcgtcggcactcactctgctggaggcaatggagttggttactgctcatgcgtttccagatccatgcttctcaagatgaaggcacacattgaccctgagccacaccacgag

SEQ ID NO: 50 - protein, 213 aa, Foot-and-mouth disease virus
SGAPPTDLQKMVMGNTKPVELILDGKTVAICCATGVFGTAYLVPRHLFAEKYDKIMLDGRAMTDSDYRVFEFEIKVKGQDMLSDAALMVLHRGNRVRDITKHFRDTARMKKGTPVVGVINNADVPRLIFSGEALTYKDIVVCMDGDTMPGLFAYRAATKAGYCGGAVLAKDGADTFIVGTHSAGGNGVGYCSCVSRSMLLKMKAHIDPEPHHE

SEQ ID NO: 51 - DNA, 639 bp, Foot-and-mouth disease virus
  CDS (1)..(639)
  misc_feature (1)..(639): n is c, g, a, t/u
  misc_feature (1)..(639): G125P_O_pan_asia
agtggtgctccaccgactgacttgcaaaagatggtcatgggtaacaccaagcccgttgagctcatacttgacgggaagacagtagccatctgctgtgctactggagtgtttggcaccgcctacctcgtgcctcgtcatcttttcgcagagaagtatgacaagatcatgttggacggcagagccatgacagacagtgactacagagtgtttgagtttgagattaaagtaaaaggacaggacatgctctcagacgccgcgctcatggtgctccaccgtgggaatcgcgtgcgggacatcacgaaacacttccgtgatgtggcaagaatgaagaaaggaacccccgtcgttggtgttatcaacaacgccgatgtcccnagactgattttctctggtgaggccctcacctacaaggacattgtagtgtgcatggatggagacaccatgcctggcctctttgcctacaaggccgccaccaaggccggctactgtggaggagccgttctcgcaaaggacggagccgagactttcatcgtcggcacacactctgcgggcggcaacggagttggatactgctcctgcgtgtccaggtccatgctgctcaagatgaaggcacacatagatcctgaaccacaccatgaa

SEQ ID NO: 52 - protein, 213 aa, Foot-and-mouth disease virus
SGAPPTDLQKMVMGNTKPVELILDGKTVAICCATGVFGTAYLVPRHLFAEKYDKIMLDGRAMTDSDYRVFEFEIKVKGQDMLSDAALMVLHRGNRVRDITKHFRDVARMKKGTPVVGVINNADVPRLIFSGEALTYKDIVVCMDGDTMPGLFAYKAATKAGYCGGAVLAKDGAETFIVGTHSAGGNGVGYCSCVSRSMLLKMKAHIDPEPHHE

SEQ ID NO: 53 - DNA, 639 bp, Foot-and-mouth disease virus
  CDS (1)..(639)
  misc_feature (1)..(639): n is c, g, a, t/u
  misc_feature (1)..(639): G125P_O1_Manissa
agtggtgccccaccgaccgacttgcagaagatggtcatgggcaacactaagcctgttgagctcatcctcgacgggaagacggtagccatctgctgtgctaccggagtgtttggcactgcctacctcgtacctcgtcacctcttcgcggagaagtacgacaagataatgttggacggtagagccatgacagacagtgactacagagtgtttgagtttgagattaaagtaaaaggacaggacatgctctcagacgctgcactcatggtgcttcaccgtgggaaccgcgtgagagacatcacgaaacattttcgtgacacagcaagaatgaagaaaggcacccccgttgtcggtgtgatcaacaacgccgacgttccnagactgattttctctggagaggcccttacctacaaagacattgtagtgtgcatggatggagacaccatgccgggcctgtttgcctacagagccgccaccaaggctggttactgcgggggagccgttctcgccaaggacggagccgacacattcatcgttggcactcactccgcaggtggtaacggagttggatactgctcgtgcgtgtccaggtccatgctcctgaaaatgaaggcacacattgaccctgaaccacaccacgag

SEQ ID NO: 54 - protein, 213 aa, Foot-and-mouth disease virus; identical to SEQ ID NO: 50

SEQ ID NO: 55 - DNA, 639 bp, Foot-and-mouth disease virus
  CDS (1)..(639)
  misc_feature (1)..(639): n is c, g, a, t/u
  misc_feature (1)..(639): G125P_SAT1
agcggatgtccaccgaccgacctgcagaggatggtcatggcaaacgtgaaacccgttgagctcatcctcgatgggaagaccgttgcgctctgctgcgctacgggagtgttcgggacggcttatctcgtgcctcgtcatcttttcgcagagaagtacgacaagatcatgctggacggccgtgccctgacagacagtgacttcagagtgtttgagtttgaggtgaaagtaaaaggacaggacatgctctcagatgccgcgctcatggttctccactccggaaaccgtgtgcgcgatctcacgggacacttccgtgacacaatgaaactgtcgaaaggcagtcccgtcgttggtgtggtcaacaacgccgacgtcccnagactcatcttctcaggagacgcactgacctacaaagacctggtcgtttgtatggacggtgacaccatgcccggactcttcgcataccgcgcggggaccaaggttggttattgtggagcagccgttcttgcaaaagacggcgccaagactgtgatcgtcggcacccactcagccggtggcaacggagtaggctactgctcctgtgtctcacgatccatgctcctgcagatgaaagcccacatcgacccggccccccacaccgag

SEQ ID NO: 56 - protein, 213 aa, Foot-and-mouth disease virus
SGCPPTDLQRMVMANVKPVELILDGKTVALCCATGVFGTAYLVPRHLFAEKYDKIMLDGRALTDSDFRVFEFEVKVKGQDMLSDAALMVLHSGNRVRDLTGHFRDTMKLSKGSPVVGVVNNADVPRLIFSGDALTYKDLVVCMDGDTMPGLFAYRAGTKVGYCGAAVLAKDGAKTVIVGTHSAGGNGVGYCSCVSRSMLLQMKAHIDPAPHTE

SEQ ID NO: 57 - DNA, 639 bp, Foot-and-mouth disease virus
  CDS (1)..(639)
  misc_feature (1)..(639): n is c, g, a, t/u
  misc_feature (1)..(639): G125P_SAT2_Egypt_2010
agtggagcgccacccaccgacttgcaaaagatggtgatggccaacaccaaaccagtcgagctcatactcgatggtaagacagtggcgatctgctgtgccactggagtgtttgggactgcctatctcgtgcctcgtcatcttttcgctgagaagtatgacaagatcatgattgacggcagggccatgacagaccgtgatttcagagtgtttgagtttgagattaaagtaaaaggacaggacatgctctcggacgccgccctcatggtgctgcaccgtgggaaccgcgtgagagacatcacgaagcactttcgtgatcaagcaagaatgagaaaaggaacccccgtggttggcgtgatcaacaacgccgacgttccnagactcatcttctctggagaggcactcacctacaaagacattgtagtgtgtatggatggcgacaccatgccaggcctctttgcctataaagccgccaccaaagctggctactgtggaggagccgttcttgcgaaagacggagccgagactttcatcgtcggcactcactccgctggaggaaacggagttggttactgctcttgcgtttccaagtccatgctcctgcaaatgaaggcacacattgatcctgaaccacaccacgaa

SEQ ID NO: 58 - protein, 213 aa, Foot-and-mouth disease virus
SGAPPTDLQKMVMANTKPVELILDGKTVAICCATGVFGTAYLVPRHLFAEKYDKIMIDGRAMTDRDFRVFEFEIKVKGQDMLSDAALMVLHRGNRVRDITKHFRDQARMRKGTPVVGVINNADVPRLIFSGEALTYKDIVVCMDGDTMPGLFAYKAATKAGYCGGAVLAKDGAETFIVGTHSAGGNGVGYCSCVSKSMLLQMKAHIDPEPHHE

SEQ ID NO: 59 - DNA, 639 bp, Foot-and-mouth disease virus
  CDS (1)..(639)
  misc_feature (1)..(639): n is c, g, a, t/u
  misc_feature (1)..(639): G125P_SAT3
agcggatgcccaccgaccgacttgcaaaagatggtcatggcaaacgtaaagcctgttgagctcatcctcgacgggaagaccgttgcgctctgctgcgcgacgggagtgtttgggacagcttacctcgtgccccgtcatcttttcgcagagaagtatgacaagatcatgctggacggccgcgccctgacagacagtgactttagagtgtttgagtttgaggtgaaagtaaaaggacaggacatgctctctgatgccgcactcatggttctccactctggaaaccgtgtgcgcgatctcacgggacacttccgtgacaccatgaaactgtcgaaaggcagccccgtcgttggtgttgtcaacaacgctgatgtcccnagactcatcttctcaggagacgcactgacctacaaagacctggtcgtttgtatggacggtgataccatgcctggactcttcgcttaccgcgcagggaccaaggttggatactgcggagctgccgttctcgcaaaggacggcgccaagactgtgatcgttggcacccactcagccggaggcaacggagtgggctactgctcctgcgtctcacgatccatgctcctgcagatgaaggcccacattgatccggctcctcacaccgag

SEQ ID NO: 60 - protein, 213 aa, Foot-and-mouth disease virus
SGCPPTDLQKMVMANVKPVELILDGKTVALCCATGVFGTAYLVPRHLFAEKYDKIMLDGRALTDSDFRVFEFEVKVKGQDMLSDAALMVLHSGNRVRDLTGHFRDTMKLSKGSPVVGVVNNADVPRLIFSGDALTYKDLVVCMDGDTMPGLFAYRAGTKVGYCGAAVLAKDGAKTVIVGTHSAGGNGVGYCSCVSRSMLLQMKAHIDPAPHTE

SEQ ID NO: 61 - DNA, 639 bp, Foot-and-mouth disease virus
  CDS (1)..(639)
  misc_feature (1)..(639): n is c, g, a, t/u
  misc_feature (1)..(639): I128P_A_2006
agtggtgcccccccgaccgacttgcaaaagatggtcatgggcaacaccaagcctgttgagctcatcctcgacgggaagacggtagccatctgttgcgctaccggagtgtttggcactgcttaccttgtgccacgtcatcttttcgcggagaagtatgacaagatcatgctggacggcagagccatgacagacagtgactacagagtgtttgagtttgagattaaagtaaaagggcaggacatgctctcagatgccgcgctcatggtgctccaccgtgggaatcgcgtgagagacatcacgaaacactttcgtgatacagcaagaatgaagaagggcacccccgttgtcggtgttatcaacaacgctgatgtcgggagactgccnttctctggtgaggcccttacctacaaggacattgtagtgtgcatggatggagacaccatgcctggcctctttgcctacagagccgccaccaaggctggctattgtggaggagctgttcttgcaaaggacggagccgagaccttcatcgtcggcactcactccgcaggtggtaatggagttggatactgttcatgcgtttccaggtccatgctgctaaagatgaaggcacacatcgaccctgagccacaccacgag

SEQ ID NO: 62 - protein, 213 aa, Foot-and-mouth disease virus
SGAPPTDLQKMVMGNTKPVELILDGKTVAICCATGVFGTAYLVPRHLFAEKYDKIMLDGRAMTDSDYRVFEFEIKVKGQDMLSDAALMVLHRGNRVRDITKHFRDTARMKKGTPVVGVINNADVGRLPFSGEALTYKDIVVCMDGDTMPGLFAYRAATKAGYCGGAVLAKDGAETFIVGTHSAGGNGVGYCSCVSRSMLLKMKAHIDPEPHHE

SEQ ID NO: 63 - DNA, 639 bp, Foot-and-mouth disease virus
  CDS (1)..(639)
  misc_feature (1)..(639): n is c, g, a, t/u
  misc_feature (1)..(639): I128P_A24
agtggtgccccaccgaccgacttgcaaaagttggtcatgggcaacaccaagcccgttgagctcatccttgacgggaagacggtagccatttgctgtgctactggagttttcggcactgcttacctcgtgcctcgtcatcttttcgcagaaaagtacgacaagatcatgttggacggcagagccatgacagatagtgactacagagtgtttgagtttgagattaaagtaaaaggacaggacatgctctcagacgctgcgctcatggtgctccaccgtgggaatcgcgtgagagacatcacgaaacactttcgtgacacagcaagaatgaagaaaggcacccccgtcgttggtgtgatcaacaacgccgatgtcgggagactgccnttctctggtgaagcccttacctacaaggacattgtagtgtgcatggatggagacaccatgcctgggctctttgcctacaaagccgcaaccaaggctggttattgcggaggagccgtcctcgctaaggacggggctgacacgttcatcgttggcacccactccgctggaggcaatggcgttggatactgctcttgcgtttccaggtccatgcttctcaagatgaaggcacacgttgaccccgaaccacaccacgag

SEQ ID NO: 64 - protein, 213 aa, Foot-and-mouth disease virus
SGAPPTDLQKLVMGNTKPVELILDGKTVAICCATGVFGTAYLVPRHLFAEKYDKIMLDGRAMTDSDYRVFEFEIKVKGQDMLSDAALMVLHRGNRVRDITKHFRDTARMKKGTPVVGVINNADVGRLPFSGEALTYKDIVVCMDGDTMPGLFAYKAATKAGYCGGAVLAKDGADTFIVGTHSAGGNGVGYCSCVSRSMLLKMKAHVDPEPHHE

SEQ ID NO: 65 - DNA, 639 bp, Foot-and-mouth disease virus
  CDS (1)..(639)
  misc_feature (1)..(639): n is c, g, a, t/u
  misc_feature (1)..(639): I128P_Asia_leb_89
agtggtgccccaccgaccgacttgcaaaagatggtcatgagcaacactaagcctgttgagctcatccttgacggtaagacggtggccatctgctgcgccaccggagtgtttggtactgcctacctcgtgcctcgtcaccttttcgcagaaaagtacgacaggatcatgttggacggcagggccatgacagacagtgactacagagtgtttgagtttgagattaaagtaaaaggacaggacatgctctcagacgctgcgctcatggtgctccaccgtggcaaccgtgtgagagacatcacgaaacactttcgtgatacagcaagaatgaagaaaggtacccccgttgtcggcgtgatcaacaacgccgacgttgggagactgccnttctccggtgaggccctcacctacaaggacattgtagtgtgcatggatggagacaccatgccgggcctatttgcctacagagccgctaccaaggctggctactgtggaggagccgttcttgccaaggacggagctgacacatttatcgtcggcactcactccgcaggaggcaatggagtcgggtactgctcatgcgtatctaggtccatgctcttgaagatgaaggcacacattgaccccgaaccacaccacgag

SEQ ID NO: 66 - protein, 213 aa, Foot-and-mouth disease virus
SGAPPTDLQKMVMSNTKPVELILDGKTVAICCATGVFGTAYLVPRHLFAEKYDRIMLDGRAMTDSDYRVFEFEIKVKGQDMLSDAALMVLHRGNRVRDITKHFRDTARMKKGTPVVGVINNADVGRLPFSGEALTYKDIVVCMDGDTMPGLFAYRAATKAGYCGGAVLAKDGADTFIVGTHSAGGNGVGYCSCVSRSMLLKMKAHIDPEPHHE

SEQ ID NO: 67 - DNA, 639 bp, Foot-and-mouth disease virus
  CDS (1)..(639)
  misc_feature (1)..(639): n is c, g, a, t/u
  misc_feature (1)..(639): I128P_Asia1_Shamir
agtggtgccccaccgaccgacttgcaaaagatggtcatgagcaacactaagcctgttgagctcatccttgacggtaagacggtggccatctgctgcgccaccggagtgtttggtactgcctacctcgtgcctcgtcaccttttcgcagaaaagtacgacaggatcatgttggacggcagggccatgacagacagtgactacagagtgtttgagtttgagattaaagtaaaaggacaggacatgctctcagacgctgcgctcatggtgctccaccgtggcaaccgtgtgagagacatcacgaaacactttcgtgatacagcaagaatgaagaaaggtacccccgttgtcggcgtgatcaacaacgccgacgttgggagattgccnttctccggtgaggccctcacctacaaggacattgtagtgtgcatggatggagacaccatgccgggcctatttgcctacagagccgctaccaaggctggctactgtggaggagccgttcttgccaaggacggagctgacacatttatcgtcggcactcactccgcaggaggcaatggagtcgggtactgctcatgcgtatctaggtccatgctcttgaagatgaaggcacacattgaccccgaaccacaccacgag

SEQ ID NO: 68 - protein, 213 aa, Foot-and-mouth disease virus; identical to SEQ ID NO: 66

SEQ ID NO: 69 - DNA, 639 bp, Foot-and-mouth disease virus
  CDS (1)..(639)
  misc_feature (1)..(639): n is c, g, a, t/u
  misc_feature (1)..(639): I128P_C3
agcggtgccccaccgaccgacttgcaaaagatggtcatgggcaacaccaagcctgttgagctgattctcgatgggaagacggtggccatctgctgcgccaccggagtgtttggcactgcttacctcgtgccgcgtcatcttttcgcagagaagtatgacaagatcatgttggacggcagagccatgacagacagtgactacagagtgtttgagtttgagattaaagtaaaaggacaggacatgctctcggacgccgcactcatggtgctacaccgtgggaatcgcgtgagagacatcacgaagcactttcgtgacacagcaagaatgaagaaaggcacccccgtcgtaggcgtgattaacaacgccgacgttgggagactgccnttctctggtgaggcccttacctacaaagacattgtggtgtgcatggatggagacaccatgcctggcctctttgcctacagagccgccaccaaggctggttactgtggaggagccgtccttgccaaggatggagctgacacattcatcgtcggcactcactctgctggaggcaatggagttggttactgctcatgcgtttccagatccatgcttctcaagatgaaggcacacattgaccctgagccacaccacgag

SEQ ID NO: 70 - protein, 213 aa, Foot-and-mouth disease virus
SGAPPTDLQKMVMGNTKPVELILDGKTVAICCATGVFGTAYLVPRHLFAEKYDKIMLDGRAMTDSDYRVFEFEIKVKGQDMLSDAALMVLHRGNRVRDITKHFRDTARMKKGTPVVGVINNADVGRLPFSGEALTYKDIVVCMDGDTMPGLFAYRAATKAGYCGGAVLAKDGADTFIVGTHSAGGNGVGYCSCVSRSMLLKMKAHIDPEPHHE

SEQ ID NO: 71 - DNA, 639 bp, Foot-and-mouth disease virus
  CDS (1)..(639)
  misc_feature (1)..(639): n is c, g, a, t/u
  misc_feature (1)..(639): I128P_O_pan_asia
agtggtgctccaccgactgacttgcaaaagatggtcatgggtaacaccaagcccgttgagctcatacttgacgggaagacagtagccatctgctgtgctactggagtgtttggcaccgcctacctcgtgcctcgtcatcttttcgcagagaagtatgacaagatcatgttggacggcagagccatgacagacagtgactacagagtgtttgagtttgagattaaagtaaaaggacaggacatgctctcagacgccgcgctcatggtgctccaccgtgggaatcgcgtgcgggacatcacgaaacacttccgtgatgtggcaagaatgaagaaaggaacccccgtcgttggtgttatcaacaacgccgatgtcgggagactgccnttctctggtgaggccctcacctacaaggacattgtagtgtgcatggatggagacaccatgcctggcctctttgcctacaaggccgccaccaaggccggctactgtggaggagccgttctcgcaaaggacggagccgagactttcatcgtcggcacacactctgcgggcggcaacggagttggatactgctcctgcgtgtccaggtccatgctgctcaagatgaaggcacacatagatcctgaaccacaccatgaa

SEQ ID NO: 72 - protein, 213 aa, Foot-and-mouth disease virus
SGAPPTDLQKMVMGNTKPVELILDGKTVAICCATGVFGTAYLVPRHLFAEKYDKIMLDGRAMTDSDYRVFEFEIKVKGQDMLSDAALMVLHRGNRVRDITKHFRDVARMKKGTPVVGVINNADVGRLPFSGEALTYKDIVVCMDGDTMPGLFAYKAATKAGYCGGAVLAKDGAETFIVGTHSAGGNGVGYCSCVSRSMLLKMKAHIDPEPHHE

SEQ ID NO: 73 - DNA, 639 bp, Foot-and-mouth disease virus
  CDS (1)..(639)
  misc_feature (1)..(639): n is c, g, a, t/u
  misc_feature (1)..(639): I128P_O1_Manissa
agtggtgccccaccgaccgacttgcagaagatggtcatgggcaacactaagcctgttgagctcatcctcgacgggaagacggtagccatctgctgtgctaccggagtgtttggcactgcctacctcgtacctcgtcacctcttcgcggagaagtacgacaagataatgttggacggtagagccatgacagacagtgactacagagtgtttgagtttgagattaaagtaaaaggacaggacatgctctcagacgctgcactcatggtgcttcaccgtgggaaccgcgtgagagacatcacgaaacattttcgtgacacagcaagaatgaagaaaggcacccccgttgtcggtgtgatcaacaacgccgacgttgggagactgccnttctctggagaggcccttacctacaaagacattgtagtgtgcatggatggagacaccatgccgggcctgtttgcctacagagccgccaccaaggctggttactgcgggggagccgttctcgccaaggacggagccgacacattcatcgttggcactcactccgcaggtggtaacggagttggatactgctcgtgcgtgtccaggtccatgctcctgaaaatgaaggcacacattgaccctgaaccacaccacgag

SEQ ID NO: 74 - protein, 213 aa, Foot-and-mouth disease virus; identical to SEQ ID NO: 70

SEQ ID NO: 75 - DNA, 639 bp, Foot-and-mouth disease virus
  CDS (1)..(639)
  misc_feature (1)..(639): n is c, g, a, t/u
  misc_feature (1)..(639): I128P_SAT1
agcggatgtccaccgaccgacctgcagaggatggtcatggcaaacgtgaaacccgttgagctcatcctcgatgggaagaccgttgcgctctgctgcgctacgggagtgttcgggacggcttatctcgtgcctcgtcatcttttcgcagagaagtacgacaagatcatgctggacggccgtgccctgacagacagtgacttcagagtgtttgagtttgaggtgaaagtaaaaggacaggacatgctctcagatgccgcgctcatggttctccactccggaaaccgtgtgcgcgatctcacgggacacttccgtgacacaatgaaactgtcgaaaggcagtcccgtcgttggtgtggtcaacaacgccgacgtcggaagactcccnttctcaggagacgcactgacctacaaagacctggtcgtttgtatggacggtgacaccatgcccggactcttcgcataccgcgcggggaccaaggttggttattgtggagcagccgttcttgcaaaagacggcgccaagactgtgatcgtcggcacccactcagccggtggcaacggagtaggctactgctcctgtgtctcacgatccatgctcctgcagatgaaagcccacatcgacccggccccccacaccgag

SEQ ID NO: 76 - protein, 213 aa, Foot-and-mouth disease virus
SGCPPTDLQRMVMANVKPVELILDGKTVALCCATGVFGTAYLVPRHLFAEKYDKIMLDGRALTDSDFRVFEFEVKVKGQDMLSDAALMVLHSGNRVRDLTGHFRDTMKLSKGSPVVGVVNNADVGRLPFSGDALTYKDLVVCMDGDTMPGLFAYRAGTKVGYCGAAVLAKDGAKTVIVGTHSAGGNGVGYCSCVSRSMLLQMKAHIDPAPHTE

SEQ ID NO: 77 - DNA, 639 bp, Foot-and-mouth disease virus
  CDS (1)..(639)
  misc_feature (1)..(639): n is c, g, a, t/u
  misc_feature (1)..(639): I128P_SAT2_Egypt_2010
agtggagcgccacccaccgacttgcaaaagatggtgatggccaacaccaaaccagtcgagctcatactcgatggtaagacagtggcgatctgctgtgccactggagtgtttgggactgcctatctcgtgcctcgtcatcttttcgctgagaagtatgacaagatcatgattgacggcagggccatgacagaccgtgatttcagagtgtttgagtttgagattaaagtaaaaggacaggacatgctctcggacgccgccctcatggtgctgcaccgtgggaaccgcgtgagagacatcacgaagcactttcgtgatcaagcaagaatgagaaaaggaacccccgtggttggcgtgatcaacaacgccgacgttgggagactcccnttctctggagaggcactcacctacaaagacattgtagtgtgtatggatggcgacaccatgccaggcctctttgcctataaagccgccaccaaagctggctactgtggaggagccgttcttgcgaaagacggagccgagactttcatcgtcggcactcactccgctggaggaaacggagttggttactgctcttgcgtttccaagtccatgctcctgcaaatgaaggcacacattgatcctgaaccacaccacgaa

SEQ ID NO: 78 - protein, 213 aa, Foot-and-mouth disease virus
SGAPPTDLQKMVMANTKPVELILDGKTVAICCATGVFGTAYLVPRHLFAEKYDKIMIDGRAMTDRDFRVFEFEIKVKGQDMLSDAALMVLHRGNRVRDITKHFRDQARMRKGTPVVGVINNADVGRLPFSGEALTYKDIVVCMDGDTMPGLFAYKAATKAGYCGGAVLAKDGAETFIVGTHSAGGNGVGYCSCVSKSMLLQMKAHIDPEPHHE

SEQ ID NO: 79 - DNA, 639 bp, Foot-and-mouth disease virus
  CDS (1)..(639)
  misc_feature (1)..(639): n is c, g, a, t/u
  misc_feature (1)..(639): I128P_SAT3
agcggatgcccaccgaccgacttgcaaaagatggtcatggcaaacgtaaagcctgttgagctcatcctcgacgggaagaccgttgcgctctgctgcgcgacgggagtgtttgggacagcttacctcgtgccccgtcatcttttcgcagagaagtatgacaagatcatgctggacggccgcgccctgacagacagtgactttagagtgtttgagtttgaggtgaaagtaaaaggacaggacatgctctctgatgccgcactcatggttctccactctggaaaccgtgtgcgcgatctcacgggacacttccgtgacaccatgaaactgtcgaaaggcagccccgtcgttggtgttgtcaacaacgctgatgtcggaagactcccnttctcaggagacgcactgacctacaaagacctggtcgtttgtatggacggtgataccatgcctggactcttcgcttaccgcgcagggaccaaggttggatactgcggagctgccgttctcgcaaaggacggcgccaagactgtgatcgttggcacccactcagccggaggcaacggagtgggctactgctcctgcgtctcacgatccatgctcctgcagatgaaggcccacattgatccggctcctcacaccgag

SEQ ID NO: 80 - protein, 213 aa, Foot-and-mouth disease virus
SGCPPTDLQKMVMANVKPVELILDGKTVALCCATGVFGTAYLVPRHLFAEKYDKIMLDGRALTDSDFRVFEFEVKVKGQDMLSDAALMVLHSGNRVRDLTGHFRDTMKLSKGSPVVGVVNNADVGRLPFSGDALTYKDLVVCMDGDTMPGLFAYRAGTKVGYCGAAVLAKDGAKTVIVGTHSAGGNGVGYCSCVSRSMLLQMKAHIDPAPHTE

SEQ ID NO: 81 - DNA, 639 bp, Foot-and-mouth disease virus
  CDS (1)..(639)
  misc_feature (1)..(639): n is c, g, a, t/u
  misc_feature (1)..(639): I22P_A_2006
agtggtgcccccccgaccgacttgcaaaagatggtcatgggcaacaccaagcctgttgagctcccnctcgacgggaagacggtagccatctgttgcgctaccggagtgtttggcactgcttaccttgtgccacgtcatcttttcgcggagaagtatgacaagatcatgctggacggcagagccatgacagacagtgactacagagtgtttgagtttgagattaaagtaaaagggcaggacatgctctcagatgccgcgctcatggtgctccaccgtgggaatcgcgtgagagacatcacgaaacactttcgtgatacagcaagaatgaagaagggcacccccgttgtcggtgttatcaacaacgctgatgtcgggagactgattttctctggtgaggcccttacctacaaggacattgtagtgtgcatggatggagacaccatgcctggcctctttgcctacagagccgccaccaaggctggctattgtggaggagctgttcttgcaaaggacggagccgagaccttcatcgtcggcactcactccgcaggtggtaatggagttggatactgttcatgcgtttccaggtccatgctgctaaagatgaaggcacacatcgaccctgagccacaccacgag

SEQ ID NO: 82 - protein, 213 aa, Foot-and-mouth disease virus
SGAPPTDLQKMVMGNTKPVELPLDGKTVAICCATGVFGTAYLVPRHLFAEKYDKIMLDGRAMTDSDYRVFEFEIKVKGQDMLSDAALMVLHRGNRVRDITKHFRDTARMKKGTPVVGVINNADVGRLIFSGEALTYKDIVVCMDGDTMPGLFAYRAATKAGYCGGAVLAKDGAETFIVGTHSAGGNGVGYCSCVSRSMLLKMKAHIDPEPHHE

SEQ ID NO: 83 - DNA, 639 bp, Foot-and-mouth disease virus
  CDS (1)..(639)
  misc_feature (1)..(639): n is c, g, a, t/u
  misc_feature (1)..(639): I22P_A24
agtggtgccccaccgaccgacttgcaaaagttggtcatgggcaacaccaagcccgttgagctcccncttgacgggaagacggtagccatttgctgtgctactggagttttcggcactgcttacctcgtgcctcgtcatcttttcgcagaaaagtacgacaagatcatgttggacggcagagccatgacagatagtgactacagagtgtttgagtttgagattaaagtaaaaggacaggacatgctctcagacgctgcgctcatggtgctccaccgtgggaatcgcgtgagagacatcacgaaacactttcgtgacacagcaagaatgaagaaaggcacccccgtcgttggtgtgatcaacaacgccgatgtcgggagactgattttctctggtgaagcccttacctacaaggacattgtagtgtgcatggatggagacaccatgcctgggctctttgcctacaaagccgcaaccaaggctggttattgcggaggagccgtcctcgctaaggacggggctgacacgttcatcgttggcacccactccgctggaggcaatggcgttggatactgctcttgcgtttccaggtccatgcttctcaagatgaaggcacacgttgaccccgaaccacaccacgag

SEQ ID NO: 84 - protein, 213 aa, Foot-and-mouth disease virus
SGAPPTDLQKLVMGNTKPVELPLDGKTVAICCATGVFGTAYLVPRHLFAEKYDKIMLDGRAMTDSDYRVFEFEIKVKGQDMLSDAALMVLHRGNRVRDITKHFRDTARMKKGTPVVGVINNADVGRLIFSGEALTYKDIVVCMDGDTMPGLFAYKAATKAGYCGGAVLAKDGADTFIVGTHSAGGNGVGYCSCVSRSMLLKMKAHVDPEPHHE

SEQ ID NO: 85 - DNA, 639 bp, Foot-and-mouth disease virus
  CDS (1)..(639)
  misc_feature (1)..(639): n is c, g, a, t/u
  misc_feature (1)..(639): I22P_Asia_leb_89
agtggtgccccaccgaccgacttgcaaaagatggtcatgagcaacactaagcctgttgagctcccncttgacggtaagacggtggccatctgctgcgccaccggagtgtttggtactgcctacctcgtgcctcgtcaccttttcgcagaaaagtacgacaggatcatgttggacggcagggccatgacagacagtgactacagagtgtttgagtttgagattaaagtaaaaggacaggacatgctctcagacgctgcgctcatggtgctccaccgtggcaaccgtgtgagagacatcacgaaacactttcgtgatacagcaagaatgaagaaaggtacccccgttgtcggcgtgatcaacaacgccgacgttgggagactgattttctccggtgaggccctcacctacaaggacattgtagtgtgcatggatggagacaccatgccgggcctatttgcctacagagccgctaccaaggctggctactgtggaggagccgttcttgccaaggacggagctgacacatttatcgtcggcactcactccgcaggaggcaatggagtcgggtactgctcatgcgtatctaggtccatgctcttgaagatgaaggcacacattgaccccgaaccacaccacgag

SEQ ID NO: 86 - protein, 213 aa, Foot-and-mouth disease virus
SGAPPTDLQKMVMSNTKPVELPLDGKTVAICCATGVFGTAYLVPRHLFAEKYDRIMLDGRAMTDSDYRVFEFEIKVKGQDMLSDAALMVLHRGNRVRDITKHFRDTARMKKGTPVVGVINNADVGRLIFSGEALTYKDIVVCMDGDTMPGLFAYRAATKAGYCGGAVLAKDGADTFIVGTHSAGGNGVGYCSCVSRSMLLKMKAHIDPEPHHE

SEQ ID NO: 87 - DNA, 639 bp, Foot-and-mouth disease virus
  CDS (1)..(639)
  misc_feature (1)..(639): n is c, g, a, t/u
  misc_feature (1)..(639): I22P_Asia1_Shami
agtggtgccccaccgaccgacttgcaaaagatggtcatgagcaacactaagcctgttgagctcccncttgacggtaagacggtggccatctgctgcgccaccggagtgtttggtactgcctacctcgtgcctcgtcaccttttcgcagaaaagtacgacaggatcatgttggacggcagggccatgacagacagtgactacagagtgtttgagtttgagattaaagtaaaaggacaggacatgctctcagacgctgcgctcatggtgctccaccgtggcaaccgtgtgagagacatcacgaaacactttcgtgatacagcaagaatgaagaaaggtacccccgttgtcggcgtgatcaacaacgccgacgttgggagattgattttctccggtgaggccctcacctacaaggacattgtagtgtgcatggatggagacaccatgccgggcctatttgcctacagagccgctaccaaggctggctactgtggaggagccgttcttgccaaggacggagctgacacatttatcgtcggcactcactccgcaggaggcaatggagtcgggtactgctcatgcgtatctaggtccatgctcttgaagatgaaggcacacattgaccccgaaccacaccacgag

SEQ ID NO: 88 - protein, 213 aa, Foot-and-mouth disease virus; identical to SEQ ID NO: 86

SEQ ID NO: 89 - DNA, 639 bp, Foot-and-mouth disease virus
  CDS (1)..(639)
  misc_feature (1)..(639): n is c, g, a, t/u
  misc_feature (1)..(639): I22P_C3
agcggtgccccaccgaccgacttgcaaaagatggtcatgggcaacaccaagcctgttgagctgccnctcgatgggaagacggtggccatctgctgcgccaccggagtgtttggcactgcttacctcgtgccgcgtcatcttttcgcagagaagtatgacaagatcatgttggacggcagagccatgacagacagtgactacagagtgtttgagtttgagattaaagtaaaaggacaggacatgctctcggacgccgcactcatggtgctacaccgtgggaatcgcgtgagagacatcacgaagcactttcgtgacacagcaagaatgaagaaaggcacccccgtcgtaggcgtgattaacaacgccgacgttgggagactgattttctctggtgaggcccttacctacaaagacattgtggtgtgcatggatggagacaccatgcctggcctctttgcctacagagccgccaccaaggctggttactgtggaggagccgtccttgccaaggatggagctgacacattcatcgtcggcactcactctgctggaggcaatggagttggttactgctcatgcgtttccagatccatgcttctcaagatgaaggcacacattgaccctgagccacaccacgag

SEQ ID NO: 90 - protein, 213 aa, Foot-and-mouth disease virus
SGAPPTDLQKMVMGNTKPVELPLDGKTVAICCATGVFGTAYLVPRHLFAEKYDKIMLDGRAMTDSDYRVFEFEIKVKGQDMLSDAALMVLHRGNRVRDITKHFRDTARMKKGTPVVGVINNADVGRLIFSGEALTYKDIVVCMDGDTMPGLFAYRAATKAGYCGGAVLAKDGADTFIVGTHSAGGNGVGYCSCVSRSMLLKMKAHIDPEPHHE

SEQ ID NO: 91 - DNA, 639 bp, Foot-and-mouth disease virus
  CDS (1)..(639)
  misc_feature (1)..(639): n is c, g, a, t/u
  misc_feature (1)..(639): I22P_O_pan_asia
agtggtgctccaccgactgacttgcaaaagatggtcatgggtaacaccaagcccgttgagctcccncttgacgggaagacagtagccatctgctgtgctactggagtgtttggcaccgcctacctcgtgcctcgtcatcttttcgcagagaagtatgacaagatcatgttggacggcagagccatgacagacagtgactacagagtgtttgagtttgagattaaagtaaaaggacaggacatgctctcagacgccgcgctcatggtgctccaccgtgggaatcgcgtgcgggacatcacgaaacacttccgtgatgtggcaagaatgaagaaaggaacccccgtcgttggtgttatcaacaacgccgatgtcgggagactgattttctctggtgaggccctcacctacaaggacattgtagtgtgcatggatggagacaccatgcctggcctctttgcctacaaggccgccaccaaggccggctactgtggaggagccgttctcgcaaaggacggagccgagactttcatcgtcggcacacactctgcgggcggcaacggagttggatactgctcctgcgtgtccaggtccatgctgctcaagatgaaggcacacatagatcctgaaccacaccatgaa

SEQ ID NO: 92 - protein, 213 aa, Foot-and-mouth disease virus
SGAPPTDLQKMVMGNTKPVELPLDGKTVAICCATGVFGTAYLVPRHLFAEKYDKIMLDGRAMTDSDYRVFEFEIKVKGQDMLSDAALMVLHRGNRVRDITKHFRDVARMKKGTPVVGVINNADVGRLIFSGEALTYKDIVVCMDGDTMPGLFAYKAATKAGYCGGAVLAKDGAETFIVGTHSAGGNGVGYCSCVSRSMLLKMKAHIDPEPHHE

SEQ ID NO: 93 - DNA, 639 bp, Foot-and-mouth disease virus
  CDS (1)..(639)
  misc_feature (1)..(639): n is c, g, a, t/u
  misc_feature (1)..(639): I22P_O1_Manissa
agtggtgccccaccgaccgacttgcagaagatggtcatgggcaacactaagcctgttgagctcccnctcgacgggaagacggtagccatctgctgtgctaccggagtgtttggcactgcctacctcgtacctcgtcacctcttcgcggagaagtacgacaagataatgttggacggtagagccatgacagacagtgactacagagtgtttgagtttgagattaaagtaaaaggacaggacatgctctcagacgctgcactcatggtgcttcaccgtgggaaccgcgtgagagacatcacgaaacattttcgtgacacagcaagaatgaagaaaggcacccccgttgtcggtgtgatcaacaacgccgacgttgggagactgattttctctggagaggcccttacctacaaagacattgtagtgtgcatggatggagacaccatgccgggcctgtttgcctacagagccgccaccaaggctggttactgcgggggagccgttctcgccaaggacggagccgacacattcatcgttggcactcactccgcaggtggtaacggagttggatactgctcgtgcgtgtccaggtccatgctcctgaaaatgaaggcacacattgaccctgaaccacaccacgag

SEQ ID NO: 94 - protein, 213 aa, Foot-and-mouth disease virus; identical to SEQ ID NO: 90

SEQ ID NO: 95 - DNA, 639 bp, Foot-and-mouth disease virus
  CDS (1)..(639): I22P_SAT1
  misc_feature (1)..(639): n is c, g, a, t/u
  misc_feature (1)..(639): I22P_SAT1
agcggatgtccaccgaccgacctgcagaggatggtcatggcaaacgtgaaacccgttgagctcccnctcgatgggaagaccgttgcgctctgctgcgctacgggagtgttcgggacggcttatctcgtgcctcgtcatcttttcgcagagaagtacgacaagatcatgctggacggccgtgccctgacagacagtgacttcagagtgtttgagtttgaggtgaaagtaaaaggacaggacatgctctcagatgccgcgctcatggttctccactccggaaaccgtgtgcgcgatctcacgggacacttccgtgacacaatgaaactgtcgaaaggcagtcccgtcgttggtgtggtcaacaacgccgacgtcggaagactcatcttctcaggagacgcactgacctacaaagacctggtcgtttgtatggacggtgacaccatgcccggactcttcgcataccgcgcggggaccaaggttggttattgtggagcagccgttcttgcaaaagacggcgccaagactgtgatcgtcggcacccactcagccggtggcaacggagtaggctactgctcctgtgtctcacgatccatgctcctgcagatgaaagcccacatcgacccggccccccacaccgag

SEQ ID NO: 96 - protein, 213 aa, Foot-and-mouth disease virus
SGCPPTDLQRMVMANVKPVELPLDGKTVALCCATGVFGTAYLVPRHLFAEKYDKIMLDGRALTDSDFRVFEFEVKVKGQDMLSDAALMVLHSGNRVRDLTGHFRDTMKLSKGSPVVGVVNNADVGRLIFSGDALTYKDLVVCMDGDTMPGLFAYRAGTKVGYCGAAVLAKDGAKTVIVGTHSAGGNGVGYCSCVSRSMLLQMKAHIDPAPHTE

SEQ ID NO: 97 - DNA, 639 bp, Foot-and-mouth disease virus
  CDS (1)..(639): I22P_SAT2_Egypt_2010
  misc_feature (1)..(639): n is c, g, a, t/u
  misc_feature (1)..(639): I22P_SAT2_Egypt_2010
agtggagcgccacccaccgacttgcaaaagatggtgatggccaacaccaaaccagtcgagctcccnctcgatggtaagacagtggcgatctgctgtgccactggagtgtttgggactgcctatctcgtgcctcgtcatcttttcgctgagaagtatgacaagatcatgattgacggcagggccatgacagaccgtgatttcagagtgtttgagtttgagattaaagtaaaaggacaggacatgctctcggacgccgccctcatggtgctgcaccgtgggaaccgcgtgagagacatcacgaagcactttcgtgatcaagcaagaatgagaaaaggaacccccgtggttggcgtgatcaacaacgccgacgttgggagactcatcttctctggagaggcactcacctacaaagacattgtagtgtgtatggatggcgacaccatgccaggcctctttgcctataaagccgccaccaaagctggctactgtggaggagccgttcttgcgaaagacggagccgagactttcatcgtcggcactcactccgctggaggaaacggagttggttactgctcttgcgtttccaagtccatgctcctgcaaatgaaggcacacattgatcctgaaccacaccacgaa

SEQ ID NO: 98 - protein, 213 aa, Foot-and-mouth disease virus
SGAPPTDLQKMVMANTKPVELPLDGKTVAICCATGVFGTAYLVPRHLFAEKYDKIMIDGRAMTDRDFRVFEFEIKVKGQDMLSDAALMVLHRGNRVRDITKHFRDQARMRKGTPVVGVINNADVGRLIFSGEALTYKDIVVCMDGDTMPGLFAYKAATKAGYCGGAVLAKDGAETFIVGTHSAGGNGVGYCSCVSKSMLLQMKAHIDPEPHHE

SEQ ID NO: 99 - DNA, 639 bp, Foot-and-mouth disease virus
  CDS (1)..(639)
  misc_feature (1)..(639): n is c, g, a, t/u
  misc_feature (1)..(639): I22P_SAT3
agcggatgcccaccgaccgacttgcaaaagatggtcatggcaaacgtaaagcctgttgagctcccnctcgacgggaagaccgttgcgctctgctgcgcgacgggagtgtttgggacagcttacctcgtgccccgtcatcttttcgcagagaagtatgacaagatcatgctggacggccgcgccctgacagacagtgactttagagtgtttgagtttgaggtgaaagtaaaaggacaggacatgctctctgatgccgcactcatggttctccactctggaaaccgtgtgcgcgatctcacgggacacttccgtgacaccatgaaactgtcgaaaggcagccccgtcgttggtgttgtcaacaacgctgatgtcggaagactcatcttctcaggagacgcactgacctacaaagacctggtcgtttgtatggacggtgataccatgcctggactcttcgcttaccgcgcagggaccaaggttggatactgcggagctgccgttctcgcaaaggacggcgccaagactgtgatcgttggcacccactcagccggaggcaacggagtgggctactgctcctgcgtctcacgatccatgctcctgcagatgaaggcccacattgatccggctcctcacaccgag

SEQ ID NO: 100 - protein, 213 aa, Foot-and-mouth disease virus
SGCPPTDLQKMVMANVKPVELPLDGKTVALCCATGVFGTAYLVPRHLFAEKYDKIMLDGRALTDSDFRVFEFEVKVKGQDMLSDAALMVLHSGNRVRDLTGHFRDTMKLSKGSPVVGVVNNADVGRLIFSGDALTYKDLVVCMDGDTMPGLFAYRAGTKVGYCGAAVLAKDGAKTVIVGTHSAGGNGVGYCSCVSRSMLLQMKAHIDPAPHTE

SEQ ID NO: 101 - DNA, 639 bp, Foot-and-mouth disease virus
  CDS (1)..(639)
  misc_feature (1)..(639): n is c, g, a, t/u
  misc_feature (1)..(639): I99P_A_2006
agtggtgcccccccgaccgacttgcaaaagatggtcatgggcaacaccaagcctgttgagctcatcctcgacgggaagacggtagccatctgttgcgctaccggagtgtttggcactgcttaccttgtgccacgtcatcttttcgcggagaagtatgacaagatcatgctggacggcagagccatgacagacagtgactacagagtgtttgagtttgagattaaagtaaaagggcaggacatgctctcagatgccgcgctcatggtgctccaccgtgggaatcgcgtgagagacccnacgaaacactttcgtgatacagcaagaatgaagaagggcacccccgttgtcggtgttatcaacaacgctgatgtcgggagactgattttctctggtgaggcccttacctacaaggacattgtagtgtgcatggatggagacaccatgcctggcctctttgcctacagagccgccaccaaggctggctattgtggaggagctgttcttgcaaaggacggagccgagaccttcatcgtcggcactcactccgcaggtggtaatggagttggatactgttcatgcgtttccaggtccatgctgctaaagatgaaggcacacatcgaccctgagccacaccacgag

SEQ ID NO: 102 - protein, 213 aa, Foot-and-mouth disease virus
SGAPPTDLQKMVMGNTKPVELILDGKTVAICCATGVFGTAYLVPRHLFAEKYDKIMLDGRAMTDSDYRVFEFEIKVKGQDMLSDAALMVLHRGNRVRDPTKHFRDTARMKKGTPVVGVINNADVGRLIFSGEALTYKDIVVCMDGDTMPGLFAYRAATKAGYCGGAVLAKDGAETFIVGTHSAGGNGVGYCSCVSRSMLLKMKAHIDPEPHHE

SEQ ID NO: 103 - DNA, 639 bp, Foot-and-mouth disease virus
  CDS (1)..(639)
  misc_feature (1)..(639): n is c, g, a, t/u
  misc_feature (1)..(639): I99P_A24
agtggtgccccaccgaccgacttgcaaaagttggtcatgggcaacaccaagcccgttgagctcatccttgacgggaagacggtagccatttgctgtgctactggagttttcggcactgcttacctcgtgcctcgtcatcttttcgcagaaaagtacgacaagatcatgttggacggcagagccatgacagatagtgactacagagtgtttgagtttgagattaaagtaaaaggacaggacatgctctcagacgctgcgctcatggtgctccaccgtgggaatcgcgtgagagacccnacgaaacactttcgtgacacagcaagaatgaagaaaggcacccccgtcgttggtgtgatcaacaacgccgatgtcgggagactgattttctctggtgaagcccttacctacaaggacattgtagtgtgcatggatggagacaccatgcctgggctctttgcctacaaagccgcaaccaaggctggttattgcggaggagccgtcctcgctaaggacggggctgacacgttcatcgttggcacccactccgctggaggcaatggcgttggatactgctcttgcgtttccaggtccatgcttctcaagatgaaggcacacgttgaccccgaaccacaccacgag

SEQ ID NO: 104 - protein, 213 aa, Foot-and-mouth disease virus
SGAPPTDLQKLVMGNTKPVELILDGKTVAICCATGVFGTAYLVPRHLFAEKYDKIMLDGRAMTDSDYRVFEFEIKVKGQDMLSDAALMVLHRGNRVRDPTKHFRDTARMKKGTPVVGVINNADVGRLIFSGEALTYKDIVVCMDGDTMPGLFAYKAATKAGYCGGAVLAKDGADTFIVGTHSAGGNGVGYCSCVSRSMLLKMKAHVDPEPHHE

SEQ ID NO: 105 - DNA, 639 bp, Foot-and-mouth disease virus
  CDS (1)..(639)
  misc_feature (1)..(639): n is c, g, a, t/u
  misc_feature (1)..(639): I99P_Asia_leb_89
agtggtgccccaccgaccgacttgcaaaagatggtcatgagcaacactaagcctgttgagctcatccttgacggtaagacggtggccatctgctgcgccaccggagtgtttggtactgcctacctcgtgcctcgtcaccttttcgcagaaaagtacgacaggatcatgttggacggcagggccatgacagacagtgactacagagtgtttgagtttgagattaaagtaaaaggacaggacatgctctcagacgctgcgctcatggtgctccaccgtggcaaccgtgtgagagacccnacgaaacactttcgtgatacagcaagaatgaagaaaggtacccccgttgtcggcgtgatcaacaacgccgacgttgggagactgattttctccggtgaggccctcacctacaaggacattgtagtgtgcatggatggagacaccatgccgggcctatttgcctacagagccgctaccaaggctggctactgtggaggagccgttcttgccaaggacggagctgacacatttatcgtcggcactcactccgcaggaggcaatggagtcgggtactgctcatgcgtatctaggtccatgctcttgaagatgaaggcacacattgaccccgaaccacaccacgag

SEQ ID NO: 106 - protein, 213 aa, Foot-and-mouth disease virus
SGAPPTDLQKMVMSNTKPVELILDGKTVAICCATGVFGTAYLVPRHLFAEKYDRIMLDGRAMTDSDYRVFEFEIKVKGQDMLSDAALMVLHRGNRVRDPTKHFRDTARMKKGTPVVGVINNADVGRLIFSGEALTYKDIVVCMDGDTMPGLFAYRAATKAGYCGGAVLAKDGADTFIVGTHSAGGNGVGYCSCVSRSMLLKMKAHIDPEPHHE

SEQ ID NO: 107 - DNA, 639 bp, Foot-and-mouth disease virus
  CDS (1)..(639)
  misc_feature (1)..(639): n is c, g, a, t/u
  misc_feature (1)..(639): 199P_Asia_Shamir
agtggtgccccaccgaccgacttgcaaaagatggtcatgagcaacactaagcctgttgagctcatccttgacggtaagacggtggccatctgctgcgccaccggagtgtttggtactgcctacctcgtgcctcgtcaccttttcgcagaaaagtacgacaggatcatgttggacggcagggccatgacagacagtgactacagagtgtttgagtttgagattaaagtaaaaggacaggacatgctctcagacgctgcgctcatggtgctccaccgtggcaaccgtgtgagagacccnacgaaacactttcgtgatacagcaagaatgaagaaaggtacccccgttgtcggcgtgatcaacaacgccgacgttgggagattgattttctccggtgaggccctcacctacaaggacattgtagtgtgcatggatggagacaccatgccgggcctatttgcctacagagccgctaccaaggctggctactgtggaggagccgttcttgccaaggacggagctgacacatttatcgtcggcactcactccgcaggaggcaatggagtcgggtactgctcatgcgtatctaggtccatgctcttgaagatgaaggcacacattgaccccgaaccacaccacgag

SEQ ID NO: 108 - protein, 213 aa, Foot-and-mouth disease virus; identical to SEQ ID NO: 106

SEQ ID NO: 109 - DNA, 639 bp, Foot-and-mouth disease virus
  CDS (1)..(639)
  misc_feature (1)..(639): n is c, g, a, t/u
  misc_feature (1)..(639): I99P_C3
agcggtgccccaccgaccgacttgcaaaagatggtcatgggcaacaccaagcctgttgagctgattctcgatgggaagacggtggccatctgctgcgccaccggagtgtttggcactgcttacctcgtgccgcgtcatcttttcgcagagaagtatgacaagatcatgttggacggcagagccatgacagacagtgactacagagtgtttgagtttgagattaaagtaaaaggacaggacatgctctcggacgccgcactcatggtgctacaccgtgggaatcgcgtgagagacccnacgaagcactttcgtgacacagcaagaatgaagaaaggcacccccgtcgtaggcgtgattaacaacgccgacgttgggagactgattttctctggtgaggcccttacctacaaagacattgtggtgtgcatggatggagacaccatgcctggcctctttgcctacagagccgccaccaaggctggttactgtggaggagccgtccttgccaaggatggagctgacacattcatcgtcggcactcactctgctggaggcaatggagttggttactgctcatgcgtttccagatccatgcttctcaagatgaaggcacacattgaccctgagccacaccacgag

SEQ ID NO: 110 - protein, 213 aa, Foot-and-mouth disease virus
SGAPPTDLQKMVMGNTKPVELILDGKTVAICCATGVFGTAYLVPRHLFAEKYDKIMLDGRAMTDSDYRVFEFEIKVKGQDMLSDAALMVLHRGNRVRDPTKHFRDTARMKKGTPVVGVINNADVGRLIFSGEALTYKDIVVCMDGDTMPGLFAYRAATKAGYCGGAVLAKDGADTFIVGTHSAGGNGVGYCSCVSRSMLLKMKAHIDPEPHHE

SEQ ID NO: 111 - DNA, 639 bp, Foot-and-mouth disease virus
  CDS (1)..(639)
  misc_feature (1)..(639): n is c, g, a, t/u
  misc_feature (1)..(639): 199P_O_pan_asia
agtggtgctccaccgactgacttgcaaaagatggtcatgggtaacaccaagcccgttgagctcatacttgacgggaagacagtagccatctgctgtgctactggagtgtttggcaccgcctacctcgtgcctcgtcatcttttcgcagagaagtatgacaagatcatgttggacggcagagccatgacagacagtgactacagagtgtttgagtttgagattaaagtaaaaggacaggacatgctctcagacgccgcgctcatggtgctccaccgtgggaatcgcgtgcgggacccnacgaaacacttccgtgatgtggcaagaatgaagaaaggaacccccgtcgttggtgttatcaacaacgccgatgtcgggagactgattttctctggtgaggccctcacctacaaggacattgtagtgtgcatggatggagacaccatgcctggcctctttgcctacaaggccgccaccaaggccggctactgtggaggagccgttctcgcaaaggacggagccgagactttcatcgtcggcacacactctgcgggcggcaacggagttggatactgctcctgcgtgtccaggtccatgctgctcaagatgaaggcacacatagatcctgaaccacaccatgaa

SEQ ID NO: 112 - protein, 213 aa, Foot-and-mouth disease virus
SGAPPTDLQKMVMGNTKPVELILDGKTVAICCATGVFGTAYLVPRHLFAEKYDKIMLDGRAMTDSDYRVFEFEIKVKGQDMLSDAALMVLHRGNRVRDPTKHFRDVARMKKGTPVVGVINNADVGRLIFSGEALTYKDIVVCMDGDTMPGLFAYKAATKAGYCGGAVLAKDGAETFIVGTHSAGGNGVGYCSCVSRSMLLKMKAHIDPEPHHE

SEQ ID NO: 113 - DNA, 639 bp, Foot-and-mouth disease virus
  CDS (1)..(639)
  misc_feature (1)..(639): n is c, g, a, t/u
  misc_feature (1)..(639): 199P_01_Manissa
agtggtgccccaccgaccgacttgcagaagatggtcatgggcaacactaagcctgttgagctcatcctcgacgggaagacggtagccatctgctgtgctaccggagtgtttggcactgcctacctcgtacctcgtcacctcttcgcggagaagtacgacaagataatgttggacggtagagccatgacagacagtgactacagagtgtttgagtttgagattaaagtaaaaggacaggacatgctctcagacgctgcactcatggtgcttcaccgtgggaaccgcgtgagagacccnacgaaacattttcgtgacacagcaagaatgaagaaaggcacccccgttgtcggtgtgatcaacaacgccgacgttgggagactgattttctctggagaggcccttacctacaaagacattgtagtgtgcatggatggagacaccatgccgggcctgtttgcctacagagccgccaccaaggctggttactgcgggggagccgttctcgccaaggacggagccgacacattcatcgttggcactcactccgcaggtggtaacggagttggatactgctcgtgcgtgtccaggtccatgctcctgaaaatgaaggcacacattgaccctgaaccacaccacgag

SEQ ID NO: 114 - protein, 213 aa, Foot-and-mouth disease virus; identical to SEQ ID NO: 110

SEQ ID NO: 115 - DNA, 639 bp, Foot-and-mouth disease virus
  CDS (1)..(639)
  misc_feature (1)..(639): n is c, g, a, t/u
  misc_feature (1)..(639): 199P_SAT2_Egypt_2010
agtggagcgccacccaccgacttgcaaaagatggtgatggccaacaccaaaccagtcgagctcatactcgatggtaagacagtggcgatctgctgtgccactggagtgtttgggactgcctatctcgtgcctcgtcatcttttcgctgagaagtatgacaagatcatgattgacggcagggccatgacagaccgtgatttcagagtgtttgagtttgagattaaagtaaaaggacaggacatgctctcggacgccgccctcatggtgctgcaccgtgggaaccgcgtgagagacccnacgaagcactttcgtgatcaagcaagaatgagaaaaggaacccccgtggttggcgtgatcaacaacgccgacgttgggagactcatcttctctggagaggcactcacctacaaagacattgtagtgtgtatggatggcgacaccatgccaggcctctttgcctataaagccgccaccaaagctggctactgtggaggagccgttcttgcgaaagacggagccgagactttcatcgtcggcactcactccgctggaggaaacggagttggttactgctcttgcgtttccaagtccatgctcctgcaaatgaaggcacacattgatcctgaaccacaccacgaa

SEQ ID NO: 116 - protein, 213 aa, Foot-and-mouth disease virus
SGAPPTDLQKMVMANTKPVELILDGKTVAICCATGVFGTAYLVPRHLFAEKYDKIMIDGRAMTDRDFRVFEFEIKVKGQDMLSDAALMVLHRGNRVRDPTKHFRDQARMRKGTPVVGVINNADVGRLIFSGEALTYKDIVVCMDGDTMPGLFAYKAATKAGYCGGAVLAKDGAETFIVGTHSAGGNGVGYCSCVSKSMLLQMKAHIDPEPHHE

SEQ ID NO: 117 - DNA, 639 bp, Foot-and-mouth disease virus
  CDS (1)..(639)
  misc_feature (1)..(639): n is c, g, a, t/u
  misc_feature (1)..(639): L127P_A_2006
agtggtgcccccccgaccgacttgcaaaagatggtcatgggcaacaccaagcctgttgagctcatcctcgacgggaagacggtagccatctgttgcgctaccggagtgtttggcactgcttaccttgtgccacgtcatcttttcgcggagaagtatgacaagatcatgctggacggcagagccatgacagacagtgactacagagtgtttgagtttgagattaaagtaaaagggcaggacatgctctcagatgccgcgctcatggtgctccaccgtgggaatcgcgtgagagacatcacgaaacactttcgtgatacagcaagaatgaagaagggcacccccgttgtcggtgttatcaacaacgctgatgtcgggagaccnattttctctggtgaggcccttacctacaaggacattgtagtgtgcatggatggagacaccatgcctggcctctttgcctacagagccgccaccaaggctggctattgtggaggagctgttcttgcaaaggacggagccgagaccttcatcgtcggcactcactccgcaggtggtaatggagttggatactgttcatgcgtttccaggtccatgctgctaaagatgaaggcacacatcgaccctgagccacaccacgag

SEQ ID NO: 118 - protein, 213 aa, Foot-and-mouth disease virus
SGAPPTDLQKMVMGNTKPVELILDGKTVAICCATGVFGTAYLVPRHLFAEKYDKIMLDGRAMTDSDYRVFEFEIKVKGQDMLSDAALMVLHRGNRVRDITKHFRDTARMKKGTPVVGVINNADVGRPIFSGEALTYKDIVVCMDGDTMPGLFAYRAATKAGYCGGAVLAKDGAETFIVGTHSAGGNGVGYCSCVSRSMLLKMKAHIDPEPHHE

SEQ ID NO: 119 - DNA, 639 bp, Foot-and-mouth disease virus
  CDS (1)..(639)
  misc_feature (1)..(639): n is c, g, a, t/u
  misc_feature (1)..(639): L127P_A24
agtggtgccccaccgaccgacttgcaaaagttggtcatgggcaacaccaagcccgttgagctcatccttgacgggaagacggtagccatttgctgtgctactggagttttcggcactgcttacctcgtgcctcgtcatcttttcgcagaaaagtacgacaagatcatgttggacggcagagccatgacagatagtgactacagagtgtttgagtttgagattaaagtaaaaggacaggacatgctctcagacgctgcgctcatggtgctccaccgtgggaatcgcgtgagagacatcacgaaacactttcgtgacacagcaagaatgaagaaaggcacccccgtcgttggtgtgatcaacaacgccgatgtcgggagaccnattttctctggtgaagcccttacctacaaggacattgtagtgtgcatggatggagacaccatgcctgggctctttgcctacaaagccgcaaccaaggctggttattgcggaggagccgtcctcgctaaggacggggctgacacgttcatcgttggcacccactccgctggaggcaatggcgttggatactgctcttgcgtttccaggtccatgcttctcaagatgaaggcacacgttgaccccgaaccacaccacgag

SEQ ID NO: 120 - protein, 213 aa, Foot-and-mouth disease virus
SGAPPTDLQKLVMGNTKPVELILDGKTVAICCATGVFGTAYLVPRHLFAEKYDKIMLDGRAMTDSDYRVFEFEIKVKGQDMLSDAALMVLHRGNRVRDITKHFRDTARMKKGTPVVGVINNADVGRPIFSGEALTYKDIVVCMDGDTMPGLFAYKAATKAGYCGGAVLAKDGADTFIVGTHSAGGNGVGYCSCVSRSMLLKMKAHVDPEPHHE

SEQ ID NO: 121 - DNA, 639 bp, Foot-and-mouth disease virus
  CDS (1)..(639)
  misc_feature (1)..(639): n is c, g, a, t/u
  misc_feature (1)..(639): L127P_Asia_leb_89
agtggtgccccaccgaccgacttgcaaaagatggtcatgagcaacactaagcctgttgagctcatccttgacggtaagacggtggccatctgctgcgccaccggagtgtttggtactgcctacctcgtgcctcgtcaccttttcgcagaaaagtacgacaggatcatgttggacggcagggccatgacagacagtgactacagagtgtttgagtttgagattaaagtaaaaggacaggacatgctctcagacgctgcgctcatggtgctccaccgtggcaaccgtgtgagagacatcacgaaacactttcgtgatacagcaagaatgaagaaaggtacccccgttgtcggcgtgatcaacaacgccgacgttgggagaccnattttctccggtgaggccctcacctacaaggacattgtagtgtgcatggatggagacaccatgccgggcctatttgcctacagagccgctaccaaggctggctactgtggaggagccgttcttgccaaggacggagctgacacatttatcgtcggcactcactccgcaggaggcaatggagtcgggtactgctcatgcgtatctaggtccatgctcttgaagatgaaggcacacattgaccccgaaccacaccacgag

SEQ ID NO: 122 - protein, 213 aa, Foot-and-mouth disease virus
SGAPPTDLQKMVMSNTKPVELILDGKTVAICCATGVFGTAYLVPRHLFAEKYDRIMLDGRAMTDSDYRVFEFEIKVKGQDMLSDAALMVLHRGNRVRDITKHFRDTARMKKGTPVVGVINNADVGRPIFSGEALTYKDIVVCMDGDTMPGLFAYRAATKAGYCGGAVLAKDGADTFIVGTHSAGGNGVGYCSCVSRSMLLKMKAHIDPEPHHE

SEQ ID NO: 123 - DNA, 639 bp, Foot-and-mouth disease virus; identical to SEQ ID NO: 121
  CDS (1)..(639)
  misc_feature (1)..(639): n is c, g, a, t/u
  misc_feature (1)..(639): L127P_Asia1_Shamir

SEQ ID NO: 124 - protein, 213 aa, Foot-and-mouth disease virus; identical to SEQ ID NO: 122

SEQ ID NO: 125 - DNA, 639 bp, Foot-and-mouth disease virus
  CDS (1)..(639)
  misc_feature (1)..(639): n is c, g, a, t/u
  misc_feature (1)..(639): L127P_C3
agcggtgccccaccgaccgacttgcaaaagatggtcatgggcaacaccaagcctgttgagctgattctcgatgggaagacggtggccatctgctgcgccaccggagtgtttggcactgcttacctcgtgccgcgtcatcttttcgcagagaagtatgacaagatcatgttggacggcagagccatgacagacagtgactacagagtgtttgagtttgagattaaagtaaaaggacaggacatgctctcggacgccgcactcatggtgctacaccgtgggaatcgcgtgagagacatcacgaagcactttcgtgacacagcaagaatgaagaaaggcacccccgtcgtaggcgtgattaacaacgccgacgttgggagaccnattttctctggtgaggcccttacctacaaagacattgtggtgtgcatggatggagacaccatgcctggcctctttgcctacagagccgccaccaaggctggttactgtggaggagccgtccttgccaaggatggagctgacacattcatcgtcggcactcactctgctggaggcaatggagttggttactgctcatgcgtttccagatccatgcttctcaagatgaaggcacacattgaccctgagccacaccacgag

SEQ ID NO: 126 - protein, 213 aa, Foot-and-mouth disease virus
SGAPPTDLQKMVMGNTKPVELILDGKTVAICCATGVFGTAYLVPRHLFAEKYDKIMLDGRAMTDSDYRVFEFEIKVKGQDMLSDAALMVLHRGNRVRDITKHFRDTARMKKGTPVVGVINNADVGRPIFSGEALTYKDIVVCMDGDTMPGLFAYRAATKAGYCGGAVLAKDGADTFIVGTHSAGGNGVGYCSCVSRSMLLKMKAHIDPEPHHE

SEQ ID NO: 127 - DNA, 639 bp, Foot-and-mouth disease virus
  CDS (1)..(639)
  misc_feature (1)..(639): n is c, g, a, t/u
  misc_feature (1)..(639): L127P_O_pan_asia
agtggtgctccaccgactgacttgcaaaagatggtcatgggtaacaccaagcccgttgagctcatacttgacgggaagacagtagccatctgctgtgctactggagtgtttggcaccgcctacctcgtgcctcgtcatcttttcgcagagaagtatgacaagatcatgttggacggcagagccatgacagacagtgactacagagtgtttgagtttgagattaaagtaaaaggacaggacatgctctcagacgccgcgctcatggtgctccaccgtgggaatcgcgtgcgggacatcacgaaacacttccgtgatgtggcaagaatgaagaaaggaacccccgtcgttggtgttatcaacaacgccgatgtcgggagaccnattttctctggtgaggccctcacctacaaggacattgtagtgtgcatggatggagacaccatgcctggcctctttgcctacaaggccgccaccaaggccggctactgtggaggagccgttctcgcaaaggacggagccgagactttcatcgtcggcacacactctgcgggcggcaacggagttggatactgctcctgcgtgtccaggtccatgctgctcaagatgaaggcacacatagatcctgaaccacaccatgaa

SEQ ID NO: 128 - protein, 213 aa, Foot-and-mouth disease virus
SGAPPTDLQKMVMGNTKPVELILDGKTVAICCATGVFGTAYLVPRHLFAEKYDKIMLDGRAMTDSDYRVFEFEIKVKGQDMLSDAALMVLHRGNRVRDITKHFRDVARMKKGTPVVGVINNADVGRPIFSGEALTYKDIVVCMDGDTMPGLFAYKAATKAGYCGGAVLAKDGAETFIVGTHSAGGNGVGYCSCVSRSMLLKMKAHIDPEPHHE

SEQ ID NO: 129 - DNA, 639 bp, Foot-and-mouth disease virus
  CDS (1)..(639)
  misc_feature (1)..(639): n is c, g, a, t/u
  misc_feature (1)..(639): L127P_01_Manissa
agtggtgccccaccgaccgacttgcagaagatggtcatgggcaacactaagcctgttgagctcatcctcgacgggaagacggtagccatctgctgtgctaccggagtgtttggcactgcctacctcgtacctcgtcacctcttcgcggagaagtacgacaagataatgttggacggtagagccatgacagacagtgactacagagtgtttgagtttgagattaaagtaaaaggacaggacatgctctcagacgctgcactcatggtgcttcaccgtgggaaccgcgtgagagacatcacgaaacattttcgtgacacagcaagaatgaagaaaggcacccccgttgtcggtgtgatcaacaacgccgacgttgggagaccnattttctctggagaggcccttacctacaaagacattgtagtgtgcatggatggagacaccatgccgggcctgtttgcctacagagccgccaccaaggctggttactgcgggggagccgttctcgccaaggacggagccgacacattcatcgttggcactcactccgcaggtggtaacggagttggatactgctcgtgcgtgtccaggtccatgctcctgaaaatgaaggcacacattgaccctgaaccacaccacgag

SEQ ID NO: 130 - protein, 213 aa, Foot-and-mouth disease virus; identical to SEQ ID NO: 126

SEQ ID NO: 131 - DNA, 639 bp, Foot-and-mouth disease virus
  CDS (1)..(639)
  misc_feature (1)..(639): n is c, g, a, t/u
  misc_feature (1)..(639): L127P_SAT1
agcggatgtccaccgaccgacctgcagaggatggtcatggcaaacgtgaaacccgttgagctcatcctcgatgggaagaccgttgcgctctgctgcgctacgggagtgttcgggacggcttatctcgtgcctcgtcatcttttcgcagagaagtacgacaagatcatgctggacggccgtgccctgacagacagtgacttcagagtgtttgagtttgaggtgaaagtaaaaggacaggacatgctctcagatgccgcgctcatggttctccactccggaaaccgtgtgcgcgatctcacgggacacttccgtgacacaatgaaactgtcgaaaggcagtcccgtcgttggtgtggtcaacaacgccgacgtcggaagaccnatcttctcaggagacgcactgacctacaaagacctggtcgtttgtatggacggtgacaccatgcccggactcttcgcataccgcgcggggaccaaggttggttattgtggagcagccgttcttgcaaaagacggcgccaagactgtgatcgtcggcacccactcagccggtggcaacggagtaggctactgctcctgtgtctcacgatccatgctcctgcagatgaaagcccacatcgacccggccccccacaccgag

SEQ ID NO: 132 - protein, 213 aa, Foot-and-mouth disease virus
SGCPPTDLQRMVMANVKPVELILDGKTVALCCATGVFGTAYLVPRHLFAEKYDKIMLDGRALTDSDFRVFEFEVKVKGQDMLSDAALMVLHSGNRVRDLTGHFRDTMKLSKGSPVVGVVNNADVGRPIFSGDALTYKDLVVCMDGDTMPGLFAYRAGTKVGYCGAAVLAKDGAKTVIVGTHSAGGNGVGYCSCVSRSMLLQMKAHIDPAPHTE

SEQ ID NO: 133 - DNA, 639 bp, Foot-and-mouth disease virus
  CDS (1)..(639)
  misc_feature (1)..(639): n is c, g, a, t/u
  misc_feature (1)..(639): L127P_SAT2_Egypt_2010
agtggagcgccacccaccgacttgcaaaagatggtgatggccaacaccaaaccagtcgagctcatactcgatggtaagacagtggcgatctgctgtgccactggagtgtttgggactgcctatctcgtgcctcgtcatcttttcgctgagaagtatgacaagatcatgattgacggcagggccatgacagaccgtgatttcagagtgtttgagtttgagattaaagtaaaaggacaggacatgctctcggacgccgccctcatggtgctgcaccgtgggaaccgcgtgagagacatcacgaagcactttcgtgatcaagcaagaatgagaaaaggaacccccgtggttggcgtgatcaacaacgccgacgttgggagaccnatcttctctggagaggcactcacctacaaagacattgtagtgtgtatggatggcgacaccatgccaggcctctttgcctataaagccgccaccaaagctggctactgtggaggagccgttcttgcgaaagacggagccgagactttcatcgtcggcactcactccgctggaggaaacggagttggttactgctcttgcgtttccaagtccatgctcctgcaaatgaaggcacacattgatcctgaaccacaccacgaa

SEQ ID NO: 134 - protein, 213 aa, Foot-and-mouth disease virus
SGAPPTDLQKMVMANTKPVELILDGKTVAICCATGVFGTAYLVPRHLFAEKYDKIMIDGRAMTDRDFRVFEFEIKVKGQDMLSDAALMVLHRGNRVRDITKHFRDQARMRKGTPVVGVINNADVGRPIFSGEALTYKDIVVCMDGDTMPGLFAYKAATKAGYCGGAVLAKDGAETFIVGTHSAGGNGVGYCSCVSKSMLLQMKAHIDPEPHHE

SEQ ID NO: 135 - DNA, 639 bp, Foot-and-mouth disease virus
  CDS (1)..(639)
  misc_feature (1)..(639): n is c, g, a, t/u
  misc_feature (1)..(639): L127P_SAT3
agcggatgcccaccgaccgacttgcaaaagatggtcatggcaaacgtaaagcctgttgagctcatcctcgacgggaagaccgttgcgctctgctgcgcgacgggagtgtttgggacagcttacctcgtgccccgtcatcttttcgcagagaagtatgacaagatcatgctggacggccgcgccctgacagacagtgactttagagtgtttgagtttgaggtgaaagtaaaaggacaggacatgctctctgatgccgcactcatggttctccactctggaaaccgtgtgcgcgatctcacgggacacttccgtgacaccatgaaactgtcgaaaggcagccccgtcgttggtgttgtcaacaacgctgatgtcggaagaccnatcttctcaggagacgcactgacctacaaagacctggtcgtttgtatggacggtgataccatgcctggactcttcgcttaccgcgcagggaccaaggttggatactgcggagctgccgttctcgcaaaggacggcgccaagactgtgatcgttggcacccactcagccggaggcaacggagtgggctactgctcctgcgtctcacgatccatgctcctgcagatgaaggcccacattgatccggctcctcacaccgag

SEQ ID NO: 136 - protein, 213 aa, Foot-and-mouth disease virus
SGCPPTDLQKMVMANVKPVELILDGKTVALCCATGVFGTAYLVPRHLFAEKYDKIMLDGRALTDSDFRVFEFEVKVKGQDMLSDAALMVLHSGNRVRDLTGHFRDTMKLSKGSPVVGVVNNADVGRPIFSGDALTYKDLVVCMDGDTMPGLFAYRAGTKVGYCGAAVLAKDGAKTVIVGTHSAGGNGVGYCSCVSRSMLLQMKAHIDPAPHTE

SEQ ID NO: 137 - DNA, 639 bp, Foot-and-mouth disease virus
  CDS (1)..(639)
  misc_feature (1)..(639)
  misc_feature (1)..(639): L23P_A_2006
agtggtgcccccccgaccgacttgcaaaagatggtcatgggcaacaccaagcctgttgagctcatcccngacgggaagacggtagccatctgttgcgctaccggagtgtttggcactgcttaccttgtgccacgtcatcttttcgcggagaagtatgacaagatcatgctggacggcagagccatgacagacagtgactacagagtgtttgagtttgagattaaagtaaaagggcaggacatgctctcagatgccgcgctcatggtgctccaccgtgggaatcgcgtgagagacatcacgaaacactttcgtgatacagcaagaatgaagaagggcacccccgttgtcggtgttatcaacaacgctgatgtcgggagactgattttctctggtgaggcccttacctacaaggacattgtagtgtgcatggatggagacaccatgcctggcctctttgcctacagagccgccaccaaggctggctattgtggaggagctgttcttgcaaaggacggagccgagaccttcatcgtcggcactcactccgcaggtggtaatggagttggatactgttcatgcgtttccaggtccatgctgctaaagatgaaggcacacatcgaccctgagccacaccacgag

SEQ ID NO: 138 - protein, 213 aa, Foot-and-mouth disease virus
SGAPPTDLQKMVMGNTKPVELIPDGKTVAICCATGVFGTAYLVPRHLFAEKYDKIMLDGRAMTDSDYRVFEFEIKVKGQDMLSDAALMVLHRGNRVRDITKHFRDTARMKKGTPVVGVINNADVGRLIFSGEALTYKDIVVCMDGDTMPGLFAYRAATKAGYCGGAVLAKDGAETFIVGTHSAGGNGVGYCSCVSRSMLLKMKAHIDPEPHHE

SEQ ID NO: 139 - DNA, 639 bp, Foot-and-mouth disease virus
  CDS (1)..(639)
  misc_feature (1)..(639)
  misc_feature (1)..(639): L23P_A24
agtggtgccccaccgaccgacttgcaaaagttggtcatgggcaacaccaagcccgttgagctcatcccngacgggaagacggtagccatttgctgtgctactggagttttcggcactgcttacctcgtgcctcgtcatcttttcgcagaaaagtacgacaagatcatgttggacggcagagccatgacagatagtgactacagagtgtttgagtttgagattaaagtaaaaggacaggacatgctctcagacgctgcgctcatggtgctccaccgtgggaatcgcgtgagagacatcacgaaacactttcgtgacacagcaagaatgaagaaaggcacccccgtcgttggtgtgatcaacaacgccgatgtcgggagactgattttctctggtgaagcccttacctacaaggacattgtagtgtgcatggatggagacaccatgcctgggctctttgcctacaaagccgcaaccaaggctggttattgcggaggagccgtcctcgctaaggacggggctgacacgttcatcgttggcacccactccgctggaggcaatggcgttggatactgctcttgcgtttccaggtccatgcttctcaagatgaaggcacacgttgaccccgaaccacaccacgag

SEQ ID NO: 140 - protein, 213 aa, Foot-and-mouth disease virus
SGAPPTDLQKLVMGNTKPVELIPDGKTVAICCATGVFGTAYLVPRHLFAEKYDKIMLDGRAMTDSDYRVFEFEIKVKGQDMLSDAALMVLHRGNRVRDITKHFRDTARMKKGTPVVGVINNADVGRLIFSGEALTYKDIVVCMDGDTMPGLFAYKAATKAGYCGGAVLAKDGADTFIVGTHSAGGNGVGYCSCVSRSMLLKMKAHVDPEPHHE

SEQ ID NO: 141 - DNA, 639 bp, Foot-and-mouth disease virus
  CDS (1)..(639)
  misc_feature (1)..(639): n is c, g, a, t/u
  misc_feature (1)..(639): L23P_Asia_leb_89
agtggtgccccaccgaccgacttgcaaaagatggtcatgagcaacactaagcctgttgagctcatcccngacggtaagacggtggccatctgctgcgccaccggagtgtttggtactgcctacctcgtgcctcgtcaccttttcgcagaaaagtacgacaggatcatgttggacggcagggccatgacagacagtgactacagagtgtttgagtttgagattaaagtaaaaggacaggacatgctctcagacgctgcgctcatggtgctccaccgtggcaaccgtgtgagagacatcacgaaacactttcgtgatacagcaagaatgaagaaaggtacccccgttgtcggcgtgatcaacaacgccgacgttgggagactgattttctccggtgaggccctcacctacaaggacattgtagtgtgcatggatggagacaccatgccgggcctatttgcctacagagccgctaccaaggctggctactgtggaggagccgttcttgccaaggacggagctgacacatttatcgtcggcactcactccgcaggaggcaatggagtcgggtactgctcatgcgtatctaggtccatgctcttgaagatgaaggcacacattgaccccgaaccacaccacgag

SEQ ID NO: 142 - protein, 213 aa, Foot-and-mouth disease virus
SGAPPTDLQKMVMSNTKPVELIPDGKTVAICCATGVFGTAYLVPRHLFAEKYDRIMLDGRAMTDSDYRVFEFEIKVKGQDMLSDAALMVLHRGNRVRDITKHFRDTARMKKGTPVVGVINNADVGRLIFSGEALTYKDIVVCMDGDTMPGLFAYRAATKAGYCGGAVLAKDGADTFIVGTHSAGGNGVGYCSCVSRSMLLKMKAHIDPEPHHE

SEQ ID NO: 143 - DNA, 639 bp, Foot-and-mouth disease virus
  CDS (1)..(639)
  misc_feature (1)..(639): n is c, g, a, t/u
  misc_feature (1)..(639): L23P_Asia_Shamir
agtggtgccccaccgaccgacttgcaaaagatggtcatgagcaacactaagcctgttgagctcatcccngacggtaagacggtggccatctgctgcgccaccggagtgtttggtactgcctacctcgtgcctcgtcaccttttcgcagaaaagtacgacaggatcatgttggacggcagggccatgacagacagtgactacagagtgtttgagtttgagattaaagtaaaaggacaggacatgctctcagacgctgcgctcatggtgctccaccgtggcaaccgtgtgagagacatcacgaaacactttcgtgatacagcaagaatgaagaaaggtacccccgttgtcggcgtgatcaacaacgccgacgttgggagattgattttctccggtgaggccctcacctacaaggacattgtagtgtgcatggatggagacaccatgccgggcctatttgcctacagagccgctaccaaggctggctactgtggaggagccgttcttgccaaggacggagctgacacatttatcgtcggcactcactccgcaggaggcaatggagtcgggtactgctcatgcgtatctaggtccatgctcttgaagatgaaggcacacattgaccccgaaccacaccacgag

SEQ ID NO: 144 - protein, 213 aa, Foot-and-mouth disease virus; identical to SEQ ID NO: 142

SEQ ID NO: 145 - DNA, 639 bp, Foot-and-mouth disease virus
  CDS (1)..(639)
  misc_feature (1)..(639): n is c, g, a, t/u
  misc_feature (1)..(639): L23P_C3
agcggtgccccaccgaccgacttgcaaaagatggtcatgggcaacaccaagcctgttgagctgattccngatgggaagacggtggccatctgctgcgccaccggagtgtttggcactgcttacctcgtgccgcgtcatcttttcgcagagaagtatgacaagatcatgttggacggcagagccatgacagacagtgactacagagtgtttgagtttgagattaaagtaaaaggacaggacatgctctcggacgccgcactcatggtgctacaccgtgggaatcgcgtgagagacatcacgaagcactttcgtgacacagcaagaatgaagaaaggcacccccgtcgtaggcgtgattaacaacgccgacgttgggagactgattttctctggtgaggcccttacctacaaagacattgtggtgtgcatggatggagacaccatgcctggcctctttgcctacagagccgccaccaaggctggttactgtggaggagccgtccttgccaaggatggagctgacacattcatcgtcggcactcactctgctggaggcaatggagttggttactgctcatgcgtttccagatccatgcttctcaagatgaaggcacacattgaccctgagccacaccacgag

SEQ ID NO: 146 - protein, 213 aa, Foot-and-mouth disease virus
SGAPPTDLQKMVMGNTKPVELIPDGKTVAICCATGVFGTAYLVPRHLFAEKYDKIMLDGRAMTDSDYRVFEFEIKVKGQDMLSDAALMVLHRGNRVRDITKHFRDTARMKKGTPVVGVINNADVGRLIFSGEALTYKDIVVCMDGDTMPGLFAYRAATKAGYCGGAVLAKDGADTFIVGTHSAGGNGVGYCSCVSRSMLLKMKAHIDPEPHHE

SEQ ID NO: 147 - DNA, 639 bp, Foot-and-mouth disease virus
  CDS (1)..(639)
  misc_feature (1)..(639): n is c, g, a, t/u
  misc_feature (1)..(639): L23P_O_pan_asia
agtggtgctccaccgactgacttgcaaaagatggtcatgggtaacaccaagcccgttgagctcataccngacgggaagacagtagccatctgctgtgctactggagtgtttggcaccgcctacctcgtgcctcgtcatcttttcgcagagaagtatgacaagatcatgttggacggcagagccatgacagacagtgactacagagtgtttgagtttgagattaaagtaaaaggacaggacatgctctcagacgccgcgctcatggtgctccaccgtgggaatcgcgtgcgggacatcacgaaacacttccgtgatgtggcaagaatgaagaaaggaacccccgtcgttggtgttatcaacaacgccgatgtcgggagactgattttctctggtgaggccctcacctacaaggacattgtagtgtgcatggatggagacaccatgcctggcctctttgcctacaaggccgccaccaaggccggctactgtggaggagccgttctcgcaaaggacggagccgagactttcatcgtcggcacacactctgcgggcggcaacggagttggatactgctcctgcgtgtccaggtccatgctgctcaagatgaaggcacacatagatcctgaaccacaccatgaa

SEQ ID NO: 148 - protein, 213 aa, Foot-and-mouth disease virus
SGAPPTDLQKMVMGNTKPVELIPDGKTVAICCATGVFGTAYLVPRHLFAEKYDKIMLDGRAMTDSDYRVFEFEIKVKGQDMLSDAALMVLHRGNRVRDITKHFRDVARMKKGTPVVGVINNADVGRLIFSGEALTYKDIVVCMDGDTMPGLFAYKAATKAGYCGGAVLAKDGAETFIVGTHSAGGNGVGYCSCVSRSMLLKMKAHIDPEPHHE

SEQ ID NO: 149 - DNA, 639 bp, Foot-and-mouth disease virus
  CDS (1)..(639)
  misc_feature (1)..(639): n is c, g, a, t/u
  misc_feature (1)..(639): L23P_01_Manissa
agtggtgccccaccgaccgacttgcagaagatggtcatgggcaacactaagcctgttgagctcatcccngacgggaagacggtagccatctgctgtgctaccggagtgtttggcactgcctacctcgtacctcgtcacctcttcgcggagaagtacgacaagataatgttggacggtagagccatgacagacagtgactacagagtgtttgagtttgagattaaagtaaaaggacaggacatgctctcagacgctgcactcatggtgcttcaccgtgggaaccgcgtgagagacatcacgaaacattttcgtgacacagcaagaatgaagaaaggcacccccgttgtcggtgtgatcaacaacgccgacgttgggagactgattttctctggagaggcccttacctacaaagacattgtagtgtgcatggatggagacaccatgccgggcctgtttgcctacagagccgccaccaaggctggttactgcgggggagccgttctcgccaaggacggagccgacacattcatcgttggcactcactccgcaggtggtaacggagttggatactgctcgtgcgtgtccaggtccatgctcctgaaaatgaaggcacacattgaccctgaaccacaccacgag

SEQ ID NO: 150 - protein, 213 aa, Foot-and-mouth disease virus; identical to SEQ ID NO: 146

SEQ ID NO: 151 - DNA, 639 bp, Foot-and-mouth disease virus
  CDS (1)..(639)
  misc_feature (1)..(639): n is c, g, a, t/u
  misc_feature (1)..(639): L23P_SAT1
agcggatgtccaccgaccgacctgcagaggatggtcatggcaaacgtgaaacccgttgagctcatcccngatgggaagaccgttgcgctctgctgcgctacgggagtgttcgggacggcttatctcgtgcctcgtcatcttttcgcagagaagtacgacaagatcatgctggacggccgtgccctgacagacagtgacttcagagtgtttgagtttgaggtgaaagtaaaaggacaggacatgctctcagatgccgcgctcatggttctccactccggaaaccgtgtgcgcgatctcacgggacacttccgtgacacaatgaaactgtcgaaaggcagtcccgtcgttggtgtggtcaacaacgccgacgtcggaagactcatcttctcaggagacgcactgacctacaaagacctggtcgtttgtatggacggtgacaccatgcccggactcttcgcataccgcgcggggaccaaggttggttattgtggagcagccgttcttgcaaaagacggcgccaagactgtgatcgtcggcacccactcagccggtggcaacggagtaggctactgctcctgtgtctcacgatccatgctcctgcagatgaaagcccacatcgacccggccccccacaccgag

SEQ ID NO: 152 - protein, 213 aa, Foot-and-mouth disease virus
SGCPPTDLQRMVMANVKPVELIPDGKTVALCCATGVFGTAYLVPRHLFAEKYDKIMLDGRALTDSDFRVFEFEVKVKGQDMLSDAALMVLHSGNRVRDLTGHFRDTMKLSKGSPVVGVVNNADVGRLIFSGDALTYKDLVVCMDGDTMPGLFAYRAGTKVGYCGAAVLAKDGAKTVIVGTHSAGGNGVGYCSCVSRSMLLQMKAHIDPAPHTE

SEQ ID NO: 153 - DNA, 639 bp, Foot-and-mouth disease virus
  CDS (1)..(639)
  misc_feature (1)..(639): n is c, g, a, t/u
  misc_feature (1)..(639): L23P_SAT2_Egypt_2010
agtggagcgccacccaccgacttgcaaaagatggtgatggccaacaccaaaccagtcgagctcataccngatggtaagacagtggcgatctgctgtgccactggagtgtttgggactgcctatctcgtgcctcgtcatcttttcgctgagaagtatgacaagatcatgattgacggcagggccatgacagaccgtgatttcagagtgtttgagtttgagattaaagtaaaaggacaggacatgctctcggacgccgccctcatggtgctgcaccgtgggaaccgcgtgagagacatcacgaagcactttcgtgatcaagcaagaatgagaaaaggaacccccgtggttggcgtgatcaacaacgccgacgttgggagactcatcttctctggagaggcactcacctacaaagacattgtagtgtgtatggatggcgacaccatgccaggcctctttgcctataaagccgccaccaaagctggctactgtggaggagccgttcttgcgaaagacggagccgagactttcatcgtcggcactcactccgctggaggaaacggagttggttactgctcttgcgtttccaagtccatgctcctgcaaatgaaggcacacattgatcctgaaccacaccacgaa

SEQ ID NO: 154 - protein, 213 aa, Foot-and-mouth disease virus
SGAPPTDLQKMVMANTKPVELIPDGKTVAICCATGVFGTAYLVPRHLFAEKYDKIMIDGRAMTDRDFRVFEFEIKVKGQDMLSDAALMVLHRGNRVRDITKHFRDQARMRKGTPVVGVINNADVGRLIFSGEALTYKDIVVCMDGDTMPGLFAYKAATKAGYCGGAVLAKDGAETFIVGTHSAGGNGVGYCSCVSKSMLLQMKAHIDPEPHHE

SEQ ID NO: 155 - DNA, 639 bp, Foot-and-mouth disease virus
  CDS (1)..(639)
  misc_feature (1)..(639)
  misc_feature (1)..(639): L23P_SAT3
agcggatgcccaccgaccgacttgcaaaagatggtcatggcaaacgtaaagcctgttgagctcatcccngacgggaagaccgttgcgctctgctgcgcgacgggagtgtttgggacagcttacctcgtgccccgtcatcttttcgcagagaagtatgacaagatcatgctggacggccgcgccctgacagacagtgactttagagtgtttgagtttgaggtgaaagtaaaaggacaggacatgctctctgatgccgcactcatggttctccactctggaaaccgtgtgcgcgatctcacgggacacttccgtgacaccatgaaactgtcgaaaggcagccccgtcgttggtgttgtcaacaacgctgatgtcggaagactcatcttctcaggagacgcactgacctacaaagacctggtcgtttgtatggacggtgataccatgcctggactcttcgcttaccgcgcagggaccaaggttggatactgcggagctgccgttctcgcaaaggacggcgccaagactgtgatcgttggcacccactcagccggaggcaacggagtgggctactgctcctgcgtctcacgatccatgctcctgcagatgaaggcccacattgatccggctcctcacaccgag

SEQ ID NO: 156 - protein, 213 aa, Foot-and-mouth disease virus
SGCPPTDLQKMVMANVKPVELIPDGKTVALCCATGVFGTAYLVPRHLFAEKYDKIMLDGRALTDSDFRVFEFEVKVKGQDMLSDAALMVLHSGNRVRDLTGHFRDTMKLSKGSPVVGVVNNADVGRLIFSGDALTYKDLVVCMDGDTMPGLFAYRAGTKVGYCGAAVLAKDGAKTVIVGTHSAGGNGVGYCSCVSRSMLLQMKAHIDPAPHTE

SEQ ID NO: 157 - DNA, 639 bp, Foot-and-mouth disease virus
  CDS (1)..(639)
  misc_feature (1)..(639)
  misc_feature (1)..(639): L42H_A_2006
agtggtgcccccccgaccgacttgcaaaagatggtcatgggcaacaccaagcctgttgagctcatcctcgacgggaagacggtagccatctgttgcgctaccggagtgtttggcactgcttaccaygtgccacgtcatcttttcgcggagaagtatgacaagatcatgctggacggcagagccatgacagacagtgactacagagtgtttgagtttgagattaaagtaaaagggcaggacatgctctcagatgccgcgctcatggtgctccaccgtgggaatcgcgtgagagacatcacgaaacactttcgtgatacagcaagaatgaagaagggcacccccgttgtcggtgttatcaacaacgctgatgtcgggagactgattttctctggtgaggcccttacctacaaggacattgtagtgtgcatggatggagacaccatgcctggcctctttgcctacagagccgccaccaaggctggctattgtggaggagctgttcttgcaaaggacggagccgagaccttcatcgtcggcactcactccgcaggtggtaatggagttggatactgttcatgcgtttccaggtccatgctgctaaagatgaaggcacacatcgaccctgagccacaccacgag

SEQ ID NO: 158 - protein, 213 aa, Foot-and-mouth disease virus
SGAPPTDLQKMVMGNTKPVELILDGKTVAICCATGVFGTAYHVPRHLFAEKYDKIMLDGRAMTDSDYRVFEFEIKVKGQDMLSDAALMVLHRGNRVRDITKHFRDTARMKKGTPVVGVINNADVGRLIFSGEALTYKDIVVCMDGDTMPGLFAYRAATKAGYCGGAVLAKDGAETFIVGTHSAGGNGVGYCSCVSRSMLLKMKAHIDPEPHHE

SEQ ID NO: 159 - DNA, 639 bp, Foot-and-mouth disease virus
  CDS (1)..(639)
  misc_feature (1)..(639): n is c, g, a, t/u
  misc_feature (1)..(639): L42H_A24
agtggtgccccaccgaccgacttgcaaaagttggtcatgggcaacaccaagcccgttgagctcatccttgacgggaagacggtagccatttgctgtgctactggagttttcggcactgcttaccaygtgcctcgtcatcttttcgcagaaaagtacgacaagatcatgttggacggcagagccatgacagatagtgactacagagtgtttgagtttgagattaaagtaaaaggacaggacatgctctcagacgctgcgctcatggtgctccaccgtgggaatcgcgtgagagacatcacgaaacactttcgtgacacagcaagaatgaagaaaggcacccccgtcgttggtgtgatcaacaacgccgatgtcgggagactgattttctctggtgaagcccttacctacaaggacattgtagtgtgcatggatggagacaccatgcctgggctctttgcctacaaagccgcaaccaaggctggttattgcggaggagccgtcctcgctaaggacggggctgacacgttcatcgttggcacccactccgctggaggcaatggcgttggatactgctcttgcgtttccaggtccatgcttctcaagatgaaggcacacgttgaccccgaaccacaccacgag

SEQ ID NO: 160 - protein, 213 aa, Foot-and-mouth disease virus
SGAPPTDLQKLVMGNTKPVELILDGKTVAICCATGVFGTAYHVPRHLFAEKYDKIMLDGRAMTDSDYRVFEFEIKVKGQDMLSDAALMVLHRGNRVRDITKHFRDTARMKKGTPVVGVINNADVGRLIFSGEALTYKDIVVCMDGDTMPGLFAYKAATKAGYCGGAVLAKDGADTFIVGTHSAGGNGVGYCSCVSRSMLLKMKAHVDPEPHHE

SEQ ID NO: 161 - DNA, 639 bp, Foot-and-mouth disease virus
  CDS (1)..(639)
  misc_feature (1)..(639): n is c, g, a, t/u
  misc_feature (1)..(639): L42H_Asia_leb_89
agtggtgccccaccgaccgacttgcaaaagatggtcatgagcaacactaagcctgttgagctcatccttgacggtaagacggtggccatctgctgcgccaccggagtgtttggtactgcctaccaygtgcctcgtcaccttttcgcagaaaagtacgacaggatcatgttggacggcagggccatgacagacagtgactacagagtgtttgagtttgagattaaagtaaaaggacaggacatgctctcagacgctgcgctcatggtgctccaccgtggcaaccgtgtgagagacatcacgaaacactttcgtgatacagcaagaatgaagaaaggtacccccgttgtcggcgtgatcaacaacgccgacgttgggagactgattttctccggtgaggccctcacctacaaggacattgtagtgtgcatggatggagacaccatgccgggcctatttgcctacagagccgctaccaaggctggctactgtggaggagccgttcttgccaaggacggagctgacacatttatcgtcggcactcactccgcaggaggcaatggagtcgggtactgctcatgcgtatctaggtccatgctcttgaagatgaaggcacacattgaccccgaaccacaccacgag

SEQ ID NO: 162 - protein, 213 aa, Foot-and-mouth disease virus
SGAPPTDLQKMVMSNTKPVELILDGKTVAICCATGVFGTAYHVPRHLFAEKYDRIMLDGRAMTDSDYRVFEFEIKVKGQDMLSDAALMVLHRGNRVRDITKHFRDTARMKKGTPVVGVINNADVGRLIFSGEALTYKDIVVCMDGDTMPGLFAYRAATKAGYCGGAVLAKDGADTFIVGTHSAGGNGVGYCSCVSRSMLLKMKAHIDPEPHHE

SEQ ID NO: 163 - DNA, 639 bp, Foot-and-mouth disease virus
  CDS (1)..(639)
  misc_feature (1)..(639)
  misc_feature (1)..(639): L42H_Asia1_Shamir
agtggtgccccaccgaccgacttgcaaaagatggtcatgagcaacactaagcctgttgagctcatccttgacggtaagacggtggccatctgctgcgccaccggagtgtttggtactgcctaccaygtgcctcgtcaccttttcgcagaaaagtacgacaggatcatgttggacggcagggccatgacagacagtgactacagagtgtttgagtttgagattaaagtaaaaggacaggacatgctctcagacgctgcgctcatggtgctccaccgtggcaaccgtgtgagagacatcacgaaacactttcgtgatacagcaagaatgaagaaaggtacccccgttgtcggcgtgatcaacaacgccgacgttgggagattgattttctccggtgaggccctcacctacaaggacattgtagtgtgcatggatggagacaccatgccgggcctatttgcctacagagccgctaccaaggctggctactgtggaggagccgttcttgccaaggacggagctgacacatttatcgtcggcactcactccgcaggaggcaatggagtcgggtactgctcatgcgtatctaggtccatgctcttgaagatgaaggcacacattgaccccgaaccacaccacgag

SEQ ID NO: 164 - protein, 213 aa, Foot-and-mouth disease virus; identical to SEQ ID NO: 162

SEQ ID NO: 165 - DNA, 639 bp, Foot-and-mouth disease virus
  CDS (1)..(639)
  misc_feature (1)..(639): n is c, g, a, t/u
  misc_feature (1)..(639): L42H_C3
agcggtgccccaccgaccgacttgcaaaagatggtcatgggcaacaccaagcctgttgagctgattctcgatgggaagacggtggccatctgctgcgccaccggagtgtttggcactgcttaccaygtgccgcgtcatcttttcgcagagaagtatgacaagatcatgttggacggcagagccatgacagacagtgactacagagtgtttgagtttgagattaaagtaaaaggacaggacatgctctcggacgccgcactcatggtgctacaccgtgggaatcgcgtgagagacatcacgaagcactttcgtgacacagcaagaatgaagaaaggcacccccgtcgtaggcgtgattaacaacgccgacgttgggagactgattttctctggtgaggcccttacctacaaagacattgtggtgtgcatggatggagacaccatgcctggcctctttgcctacagagccgccaccaaggctggttactgtggaggagccgtccttgccaaggatggagctgacacattcatcgtcggcactcactctgctggaggcaatggagttggttactgctcatgcgtttccagatccatgcttctcaagatgaaggcacacattgaccctgagccacaccacgag

SEQ ID NO: 166 - protein, 213 aa, Foot-and-mouth disease virus
SGAPPTDLQKMVMGNTKPVELILDGKTVAICCATGVFGTAYHVPRHLFAEKYDKIMLDGRAMTDSDYRVFEFEIKVKGQDMLSDAALMVLHRGNRVRDITKHFRDTARMKKGTPVVGVINNADVGRLIFSGEALTYKDIVVCMDGDTMPGLFAYRAATKAGYCGGAVLAKDGADTFIVGTHSAGGNGVGYCSCVSRSMLLKMKAHIDPEPHHE

SEQ ID NO: 167 - DNA, 639 bp, Foot-and-mouth disease virus
  CDS (1)..(639)
  misc_feature (1)..(639): n is c, g, a, t/u
  misc_feature (1)..(639): L42H_O_pan_asia
agtggtgctccaccgactgacttgcaaaagatggtcatgggtaacaccaagcccgttgagctcatacttgacgggaagacagtagccatctgctgtgctactggagtgtttggcaccgcctaccaygtgcctcgtcatcttttcgcagagaagtatgacaagatcatgttggacggcagagccatgacagacagtgactacagagtgtttgagtttgagattaaagtaaaaggacaggacatgctctcagacgccgcgctcatggtgctccaccgtgggaatcgcgtgcgggacatcacgaaacacttccgtgatgtggcaagaatgaagaaaggaacccccgtcgttggtgttatcaacaacgccgatgtcgggagactgattttctctggtgaggccctcacctacaaggacattgtagtgtgcatggatggagacaccatgcctggcctctttgcctacaaggccgccaccaaggccggctactgtggaggagccgttctcgcaaaggacggagccgagactttcatcgtcggcacacactctgcgggcggcaacggagttggatactgctcctgcgtgtccaggtccatgctgctcaagatgaaggcacacatagatcctgaaccacaccatgaa

SEQ ID NO: 168 - protein, 213 aa, Foot-and-mouth disease virus
SGAPPTDLQKMVMGNTKPVELILDGKTVAICCATGVFGTAYHVPRHLFAEKYDKIMLDGRAMTDSDYRVFEFEIKVKGQDMLSDAALMVLHRGNRVRDITKHFRDVARMKKGTPVVGVINNADVGRLIFSGEALTYKDIVVCMDGDTMPGLFAYKAATKAGYCGGAVLAKDGAETFIVGTHSAGGNGVGYCSCVSRSMLLKMKAHIDPEPHHE

SEQ ID NO: 169 - DNA, 639 bp, Foot-and-mouth disease virus
  CDS (1)..(639)
  misc_feature (1)..(639): n is c, g, a, t/u
  misc_feature (1)..(639): L42H_01_Manissa
agtggtgccccaccgaccgacttgcagaagatggtcatgggcaacactaagcctgttgagctcatcctcgacgggaagacggtagccatctgctgtgctaccggagtgtttggcactgcctaccaygtacctcgtcacctcttcgcggagaagtacgacaagataatgttggacggtagagccatgacagacagtgactacagagtgtttgagtttgagattaaagtaaaaggacaggacatgctctcagacgctgcactcatggtgcttcaccgtgggaaccgcgtgagagacatcacgaaacattttcgtgacacagcaagaatgaagaaaggcacccccgttgtcggtgtgatcaacaacgccgacgttgggagactgattttctctggagaggcccttacctacaaagacattgtagtgtgcatggatggagacaccatgccgggcctgtttgcctacagagccgccaccaaggctggttactgcgggggagccgttctcgccaaggacggagccgacacattcatcgttggcactcactccgcaggtggtaacggagttggatactgctcgtgcgtgtccaggtccatgctcctgaaaatgaaggcacacattgaccctgaaccacaccacgag

SEQ ID NO: 170 - protein, 213 aa, Foot-and-mouth disease virus; identical to SEQ ID NO: 166

SEQ ID NO: 171 - DNA, 639 bp, Foot-and-mouth disease virus
  CDS (1)..(639)
  misc_feature (1)..(639): n is c, g, a, t/u
  misc_feature (1)..(639): L42H_SAT1
agcggatgtccaccgaccgacctgcagaggatggtcatggcaaacgtgaaacccgttgagctcatcctcgatgggaagaccgttgcgctctgctgcgctacgggagtgttcgggacggcttatcaygtgcctcgtcatcttttcgcagagaagtacgacaagatcatgctggacggccgtgccctgacagacagtgacttcagagtgtttgagtttgaggtgaaagtaaaaggacaggacatgctctcagatgccgcgctcatggttctccactccggaaaccgtgtgcgcgatctcacgggacacttccgtgacacaatgaaactgtcgaaaggcagtcccgtcgttggtgtggtcaacaacgccgacgtcggaagactcatcttctcaggagacgcactgacctacaaagacctggtcgtttgtatggacggtgacaccatgcccggactcttcgcataccgcgcggggaccaaggttggttattgtggagcagccgttcttgcaaaagacggcgccaagactgtgatcgtcggcacccactcagccggtggcaacggagtaggctactgctcctgtgtctcacgatccatgctcctgcagatgaaagcccacatcgacccggccccccacaccgag

SEQ ID NO: 172 - protein, 213 aa, Foot-and-mouth disease virus
SGCPPTDLQRMVMANVKPVELILDGKTVALCCATGVFGTAYHVPRHLFAEKYDKIMLDGRALTDSDFRVFEFEVKVKGQDMLSDAALMVLHSGNRVRDLTGHFRDTMKLSKGSPVVGVVNNADVGRLIFSGDALTYKDLVVCMDGDTMPGLFAYRAGTKVGYCGAAVLAKDGAKTVIVGTHSAGGNGVGYCSCVSRSMLLQMKAHIDPAPHTE

SEQ ID NO: 173 - DNA, 639 bp, Foot-and-mouth disease virus
  CDS (1)..(639)
  misc_feature (1)..(639): n is c, g, a, t/u
  misc_feature (1)..(639): L42H_SAT_Egypt_2010
agtggagcgccacccaccgacttgcaaaagatggtgatggccaacaccaaaccagtcgagctcatactcgatggtaagacagtggcgatctgctgtgccactggagtgtttgggactgcctatcaygtgcctcgtcatcttttcgctgagaagtatgacaagatcatgattgacggcagggccatgacagaccgtgatttcagagtgtttgagtttgagattaaagtaaaaggacaggacatgctctcggacgccgccctcatggtgctgcaccgtgggaaccgcgtgagagacatcacgaagcactttcgtgatcaagcaagaatgagaaaaggaacccccgtggttggcgtgatcaacaacgccgacgttgggagactcatcttctctggagaggcactcacctacaaagacattgtagtgtgtatggatggcgacaccatgccaggcctctttgcctataaagccgccaccaaagctggctactgtggaggagccgttcttgcgaaagacggagccgagactttcatcgtcggcactcactccgctggaggaaacggagttggttactgctcttgcgtttccaagtccatgctcctgcaaatgaaggcacacattgatcctgaaccacaccacgaa

SEQ ID NO: 174 - protein, 213 aa, Foot-and-mouth disease virus
SGAPPTDLQKMVMANTKPVELILDGKTVAICCATGVFGTAYHVPRHLFAEKYDKIMIDGRAMTDRDFRVFEFEIKVKGQDMLSDAALMVLHRGNRVRDITKHFRDQARMRKGTPVVGVINNADVGRLIFSGEALTYKDIVVCMDGDTMPGLFAYKAATKAGYCGGAVLAKDGAETFIVGTHSAGGNGVGYCSCVSKSMLLQMKAHIDPEPHHE

SEQ ID NO: 175 - DNA, 639 bp, Foot-and-mouth disease virus
  CDS (1)..(639)
  misc_feature (1)..(639): n is c, g, a, t/u
  misc_feature (1)..(639): L42H_SAT3
agcggatgcccaccgaccgacttgcaaaagatggtcatggcaaacgtaaagcctgttgagctcatcctcgacgggaagaccgttgcgctctgctgcgcgacgggagtgtttgggacagcttaccaygtgccccgtcatcttttcgcagagaagtatgacaagatcatgctggacggccgcgccctgacagacagtgactttagagtgtttgagtttgaggtgaaagtaaaaggacaggacatgctctctgatgccgcactcatggttctccactctggaaaccgtgtgcgcgatctcacgggacacttccgtgacaccatgaaactgtcgaaaggcagccccgtcgttggtgttgtcaacaacgctgatgtcggaagactcatcttctcaggagacgcactgacctacaaagacctggtcgtttgtatggacggtgataccatgcctggactcttcgcttaccgcgcagggaccaaggttggatactgcggagctgccgttctcgcaaaggacggcgccaagactgtgatcgttggcacccactcagccggaggcaacggagtgggctactgctcctgcgtctcacgatccatgctcctgcagatgaaggcccacattgatccggctcctcacaccgag

SEQ ID NO: 176 - protein, 213 aa, Foot-and-mouth disease virus
SGCPPTDLQKMVMANVKPVELILDGKTVALCCATGVFGTAYHVPRHLFAEKYDKIMLDGRALTDSDFRVFEFEVKVKGQDMLSDAALMVLHSGNRVRDLTGHFRDTMKLSKGSPVVGVVNNADVGRLIFSGDALTYKDLVVCMDGDTMPGLFAYRAGTKVGYCGAAVLAKDGAKTVIVGTHSAGGNGVGYCSCVSRSMLLQMKAHIDPAPHTE

SEQ ID NO: 177 - DNA, 639 bp, Foot-and-mouth disease virus
  CDS (1)..(639)
  misc_feature (1)..(639): n is c, g, a, t/u
  misc_feature (1)..(639): L99P_SAT1
agcggatgtccaccgaccgacctgcagaggatggtcatggcaaacgtgaaacccgttgagctcatcctcgatgggaagaccgttgcgctctgctgcgctacgggagtgttcgggacggcttatctcgtgcctcgtcatcttttcgcagagaagtacgacaagatcatgctggacggccgtgccctgacagacagtgacttcagagtgtttgagtttgaggtgaaagtaaaaggacaggacatgctctcagatgccgcgctcatggttctccactccggaaaccgtgtgcgcgatccnacgggacacttccgtgacacaatgaaactgtcgaaaggcagtcccgtcgttggtgtggtcaacaacgccgacgtcggaagactcatcttctcaggagacgcactgacctacaaagacctggtcgtttgtatggacggtgacaccatgcccggactcttcgcataccgcgcggggaccaaggttggttattgtggagcagccgttcttgcaaaagacggcgccaagactgtgatcgtcggcacccactcagccggtggcaacggagtaggctactgctcctgtgtctcacgatccatgctcctgcagatgaaagcccacatcgacccggccccccacaccgag

SEQ ID NO: 178 - protein, 213 aa, Foot-and-mouth disease virus
SGCPPTDLQRMVMANVKPVELILDGKTVALCCATGVFGTAYLVPRHLFAEKYDKIMLDGRALTDSDFRVFEFEVKVKGQDMLSDAALMVLHSGNRVRDPTGHFRDTMKLSKGSPVVGVVNNADVGRLIFSGDALTYKDLVVCMDGDTMPGLFAYRAGTKVGYCGAAVLAKDGAKTVIVGTHSAGGNGVGYCSCVSRSMLLQMKAHIDPAPHTE

SEQ ID NO: 179 - DNA, 639 bp, Foot-and-mouth disease virus
  CDS (1)..(639)
  misc_feature (1)..(639): n is c, g, a, t/u
  misc_feature (1)..(639): L99P_SAT3
agcggatgcccaccgaccgacttgcaaaagatggtcatggcaaacgtaaagcctgttgagctcatcctcgacgggaagaccgttgcgctctgctgcgcgacgggagtgtttgggacagcttacctcgtgccccgtcatcttttcgcagagaagtatgacaagatcatgctggacggccgcgccctgacagacagtgactttagagtgtttgagtttgaggtgaaagtaaaaggacaggacatgctctctgatgccgcactcatggttctccactctggaaaccgtgtgcgcgatccnacgggacacttccgtgacaccatgaaactgtcgaaaggcagccccgtcgttggtgttgtcaacaacgctgatgtcggaagactcatcttctcaggagacgcactgacctacaaagacctggtcgtttgtatggacggtgataccatgcctggactcttcgcttaccgcgcagggaccaaggttggatactgcggagctgccgttctcgcaaaggacggcgccaagactgtgatcgttggcacccactcagccggaggcaacggagtgggctactgctcctgcgtctcacgatccatgctcctgcagatgaaggcccacattgatccggctcctcacaccgag

SEQ ID NO: 180 - protein, 213 aa, Foot-and-mouth disease virus
SGCPPTDLQKMVMANVKPVELILDGKTVALCCATGVFGTAYLVPRHLFAEKYDKIMLDGRALTDSDFRVFEFEVKVKGQDMLSDAALMVLHSGNRVRDPTGHFRDTMKLSKGSPVVGVVNNADVGRLIFSGDALTYKDLVVCMDGDTMPGLFAYRAGTKVGYCGAAVLAKDGAKTVIVGTHSAGGNGVGYCSCVSRSMLLQMKAHIDPAPHTE

SEQ ID NO: 181 - DNA, 639 bp, Foot-and-mouth disease virus
  CDS (1)..(639)
  misc_feature (1)..(639): n is c, g, a, t/u
  misc_feature (1)..(639): R126P_A_2006
agtggtgcccccccgaccgacttgcaaaagatggtcatgggcaacaccaagcctgttgagctcatcctcgacgggaagacggtagccatctgttgcgctaccggagtgtttggcactgcttaccttgtgccacgtcatcttttcgcggagaagtatgacaagatcatgctggacggcagagccatgacagacagtgactacagagtgtttgagtttgagattaaagtaaaagggcaggacatgctctcagatgccgcgctcatggtgctccaccgtgggaatcgcgtgagagacatcacgaaacactttcgtgatacagcaagaatgaagaagggcacccccgttgtcggtgttatcaacaacgctgatgtcgggccnctgattttctctggtgaggcccttacctacaaggacattgtagtgtgcatggatggagacaccatgcctggcctctttgcctacagagccgccaccaaggctggctattgtggaggagctgttcttgcaaaggacggagccgagaccttcatcgtcggcactcactccgcaggtggtaatggagttggatactgttcatgcgtttccaggtccatgctgctaaagatgaaggcacacatcgaccctgagccacaccacgag

SEQ ID NO: 182 - protein, 213 aa, Foot-and-mouth disease virus
SGAPPTDLQKMVMGNTKPVELILDGKTVAICCATGVFGTAYLVPRHLFAEKYDKIMLDGRAMTDSDYRVFEFEIKVKGQDMLSDAALMVLHRGNRVRDITKHFRDTARMKKGTPVVGVINNADVGPLIFSGEALTYKDIVVCMDGDTMPGLFAYRAATKAGYCGGAVLAKDGAETFIVGTHSAGGNGVGYCSCVSRSMLLKMKAHIDPEPHHE

SEQ ID NO: 183 - DNA, 639 bp, Foot-and-mouth disease virus
  CDS (1)..(639)
  misc_feature (1)..(639): n is c, g, a, t/u
  misc_feature (1)..(639): R126P_A24
agtggtgccccaccgaccgacttgcaaaagttggtcatgggcaacaccaagcccgttgagctcatccttgacgggaagacggtagccatttgctgtgctactggagttttcggcactgcttacctcgtgcctcgtcatcttttcgcagaaaagtacgacaagatcatgttggacggcagagccatgacagatagtgactacagagtgtttgagtttgagattaaagtaaaaggacaggacatgctctcagacgctgcgctcatggtgctccaccgtgggaatcgcgtgagagacatcacgaaacactttcgtgacacagcaagaatgaagaaaggcacccccgtcgttggtgtgatcaacaacgccgatgtcgggccnctgattttctctggtgaagcccttacctacaaggacattgtagtgtgcatggatggagacaccatgcctgggctctttgcctacaaagccgcaaccaaggctggttattgcggaggagccgtcctcgctaaggacggggctgacacgttcatcgttggcacccactccgctggaggcaatggcgttggatactgctcttgcgtttccaggtccatgcttctcaagatgaaggcacacgttgaccccgaaccacaccacgag

SEQ ID NO: 184 - protein, 213 aa, Foot-and-mouth disease virus
SGAPPTDLQKLVMGNTKPVELILDGKTVAICCATGVFGTAYLVPRHLFAEKYDKIMLDGRAMTDSDYRVFEFEIKVKGQDMLSDAALMVLHRGNRVRDITKHFRDTARMKKGTPVVGVINNADVGPLIFSGEALTYKDIVVCMDGDTMPGLFAYKAATKAGYCGGAVLAKDGADTFIVGTHSAGGNGVGYCSCVSRSMLLKMKAHVDPEPHHE

SEQ ID NO: 185 - DNA, 639 bp, Foot-and-mouth disease virus
  CDS (1)..(639)
  misc_feature (1)..(639): n is c, g, a, t/u
  misc_feature (1)..(639): R126P_Asia_leb_88
agtggtgccccaccgaccgacttgcaaaagatggtcatgagcaacactaagcctgttgagctcatccttgacggtaagacggtggccatctgctgcgccaccggagtgtttggtactgcctacctcgtgcctcgtcaccttttcgcagaaaagtacgacaggatcatgttggacggcagggccatgacagacagtgactacagagtgtttgagtttgagattaaagtaaaaggacaggacatgctctcagacgctgcgctcatggtgctccaccgtggcaaccgtgtgagagacatcacgaaacactttcgtgatacagcaagaatgaagaaaggtacccccgttgtcggcgtgatcaacaacgccgacgttgggccnctgattttctccggtgaggccctcacctacaaggacattgtagtgtgcatggatggagacaccatgccgggcctatttgcctacagagccgctaccaaggctggctactgtggaggagccgttcttgccaaggacggagctgacacatttatcgtcggcactcactccgcaggaggcaatggagtcgggtactgctcatgcgtatctaggtccatgctcttgaagatgaaggcacacattgaccccgaaccacaccacgag

SEQ ID NO: 186 - protein, 213 aa, Foot-and-mouth disease virus
SGAPPTDLQKMVMSNTKPVELILDGKTVAICCATGVFGTAYLVPRHLFAEKYDRIMLDGRAMTDSDYRVFEFEIKVKGQDMLSDAALMVLHRGNRVRDITKHFRDTARMKKGTPVVGVINNADVGPLIFSGEALTYKDIVVCMDGDTMPGLFAYRAATKAGYCGGAVLAKDGADTFIVGTHSAGGNGVGYCSCVSRSMLLKMKAHIDPEPHHE

SEQ ID NO: 187 - DNA, 639 bp, Foot-and-mouth disease virus
  CDS (1)..(639)
  misc_feature (1)..(639): n is c, g, a, t/u
  misc_feature (1)..(639): R126P_Asia_Shamir
agtggtgccccaccgaccgacttgcaaaagatggtcatgagcaacactaagcctgttgagctcatccttgacggtaagacggtggccatctgctgcgccaccggagtgtttggtactgcctacctcgtgcctcgtcaccttttcgcagaaaagtacgacaggatcatgttggacggcagggccatgacagacagtgactacagagtgtttgagtttgagattaaagtaaaaggacaggacatgctctcagacgctgcgctcatggtgctccaccgtggcaaccgtgtgagagacatcacgaaacactttcgtgatacagcaagaatgaagaaaggtacccccgttgtcggcgtgatcaacaacgccgacgttgggccnttgattttctccggtgaggccctcacctacaaggacattgtagtgtgcatggatggagacaccatgccgggcctatttgcctacagagccgctaccaaggctggctactgtggaggagccgttcttgccaaggacggagctgacacatttatcgtcggcactcactccgcaggaggcaatggagtcgggtactgctcatgcgtatctaggtccatgctcttgaagatgaaggcacacattgaccccgaaccacaccacgag

SEQ ID NO: 188 - protein, 213 aa, Foot-and-mouth disease virus; identical to SEQ ID NO: 186

SEQ ID NO: 189 - DNA, 639 bp, Foot-and-mouth disease virus
  CDS (1)..(639)
  misc_feature (1)..(639): n is c, g, a, t/u
  misc_feature (1)..(639): R126P_C3
agcggtgccccaccgaccgacttgcaaaagatggtcatgggcaacaccaagcctgttgagctgattctcgatgggaagacggtggccatctgctgcgccaccggagtgtttggcactgcttacctcgtgccgcgtcatcttttcgcagagaagtatgacaagatcatgttggacggcagagccatgacagacagtgactacagagtgtttgagtttgagattaaagtaaaaggacaggacatgctctcggacgccgcactcatggtgctacaccgtgggaatcgcgtgagagacatcacgaagcactttcgtgacacagcaagaatgaagaaaggcacccccgtcgtaggcgtgattaacaacgccgacgttgggccnctgattttctctggtgaggcccttacctacaaagacattgtggtgtgcatggatggagacaccatgcctggcctctttgcctacagagccgccaccaaggctggttactgtggaggagccgtccttgccaaggatggagctgacacattcatcgtcggcactcactctgctggaggcaatggagttggttactgctcatgcgtttccagatccatgcttctcaagatgaaggcacacattgaccctgagccacaccacgag

SEQ ID NO: 190 - protein, 213 aa, Foot-and-mouth disease virus
SGAPPTDLQKMVMGNTKPVELILDGKTVAICCATGVFGTAYLVPRHLFAEKYDKIMLDGRAMTDSDYRVFEFEIKVKGQDMLSDAALMVLHRGNRVRDITKHFRDTARMKKGTPVVGVINNADVGPLIFSGEALTYKDIVVCMDGDTMPGLFAYRAATKAGYCGGAVLAKDGADTFIVGTHSAGGNGVGYCSCVSRSMLLKMKAHIDPEPHHE

SEQ ID NO: 191 - DNA, 639 bp, Foot-and-mouth disease virus
  CDS (1)..(639)
  misc_feature (1)..(639): n is c, g, a, t/u
  misc_feature (1)..(639): R126_O_pan_asia
agtggtgctccaccgactgacttgcaaaagatggtcatgggtaacaccaagcccgttgagctcatacttgacgggaagacagtagccatctgctgtgctactggagtgtttggcaccgcctacctcgtgcctcgtcatcttttcgcagagaagtatgacaagatcatgttggacggcagagccatgacagacagtgactacagagtgtttgagtttgagattaaagtaaaaggacaggacatgctctcagacgccgcgctcatggtgctccaccgtgggaatcgcgtgcgggacatcacgaaacacttccgtgatgtggcaagaatgaagaaaggaacccccgtcgttggtgttatcaacaacgccgatgtcgggccnctgattttctctggtgaggccctcacctacaaggacattgtagtgtgcatggatggagacaccatgcctggcctctttgcctacaaggccgccaccaaggccggctactgtggaggagccgttctcgcaaaggacggagccgagactttcatcgtcggcacacactctgcgggcggcaacggagttggatactgctcctgcgtgtccaggtccatgctgctcaagatgaaggcacacatagatcctgaaccacaccatgaa

SEQ ID NO: 192 - protein, 213 aa, Foot-and-mouth disease virus
SGAPPTDLQKMVMGNTKPVELILDGKTVAICCATGVFGTAYLVPRHLFAEKYDKIMLDGRAMTDSDYRVFEFEIKVKGQDMLSDAALMVLHRGNRVRDITKHFRDVARMKKGTPVVGVINNADVGPLIFSGEALTYKDIVVCMDGDTMPGLFAYKAATKAGYCGGAVLAKDGAETFIVGTHSAGGNGVGYCSCVSRSMLLKMKAHIDPEPHHE

SEQ ID NO: 193 - DNA, 639 bp, Foot-and-mouth disease virus
  CDS (1)..(639)
  misc_feature (1)..(639): n is c, g, a, t/u
  misc_feature (1)..(639): R126P_01_Manissa
agtggtgccccaccgaccgacttgcagaagatggtcatgggcaacactaagcctgttgagctcatcctcgacgggaagacggtagccatctgctgtgctaccggagtgtttggcactgcctacctcgtacctcgtcacctcttcgcggagaagtacgacaagataatgttggacggtagagccatgacagacagtgactacagagtgtttgagtttgagattaaagtaaaaggacaggacatgctctcagacgctgcactcatggtgcttcaccgtgggaaccgcgtgagagacatcacgaaacattttcgtgacacagcaagaatgaagaaaggcacccccgttgtcggtgtgatcaacaacgccgacgttgggccnctgattttctctggagaggcccttacctacaaagacattgtagtgtgcatggatggagacaccatgccgggcctgtttgcctacagagccgccaccaaggctggttactgcgggggagccgttctcgccaaggacggagccgacacattcatcgttggcactcactccgcaggtggtaacggagttggatactgctcgtgcgtgtccaggtccatgctcctgaaaatgaaggcacacattgaccctgaaccacaccacgag

SEQ ID NO: 194 - protein, 213 aa, Foot-and-mouth disease virus; identical to SEQ ID NO: 190

SEQ ID NO: 195 - DNA, 639 bp, Foot-and-mouth disease virus
  CDS (1)..(639)
  misc_feature (1)..(639): n is c, g, a, t/u
  misc_feature (1)..(639): R126P_SAT1
agcggatgtccaccgaccgacctgcagaggatggtcatggcaaacgtgaaacccgttgagctcatcctcgatgggaagaccgttgcgctctgctgcgctacgggagtgttcgggacggcttatctcgtgcctcgtcatcttttcgcagagaagtacgacaagatcatgctggacggccgtgccctgacagacagtgacttcagagtgtttgagtttgaggtgaaagtaaaaggacaggacatgctctcagatgccgcgctcatggttctccactccggaaaccgtgtgcgcgatctcacgggacacttccgtgacacaatgaaactgtcgaaaggcagtcccgtcgttggtgtggtcaacaacgccgacgtcggaccnctcatcttctcaggagacgcactgacctacaaagacctggtcgtttgtatggacggtgacaccatgcccggactcttcgcataccgcgcggggaccaaggttggttattgtggagcagccgttcttgcaaaagacggcgccaagactgtgatcgtcggcacccactcagccggtggcaacggagtaggctactgctcctgtgtctcacgatccatgctcctgcagatgaaagcccacatcgacccggccccccacaccgag

SEQ ID NO: 196 - protein, 213 aa, Foot-and-mouth disease virus
SGCPPTDLQRMVMANVKPVELILDGKTVALCCATGVFGTAYLVPRHLFAEKYDKIMLDGRALTDSDFRVFEFEVKVKGQDMLSDAALMVLHSGNRVRDLTGHFRDTMKLSKGSPVVGVVNNADVGPLIFSGDALTYKDLVVCMDGDTMPGLFAYRAGTKVGYCGAAVLAKDGAKTVIVGTHSAGGNGVGYCSCVSRSMLLQMKAHIDPAPHTE

SEQ ID NO: 197 - DNA, 639 bp, Foot-and-mouth disease virus
  CDS (1)..(639)
  misc_feature (1)..(639): n is c, g, a, t/u
  misc_feature (1)..(639): R126_SAT_Egypt_2010
agtggagcgccacccaccgacttgcaaaagatggtgatggccaacaccaaaccagtcgagctcatactcgatggtaagacagtggcgatctgctgtgccactggagtgtttgggactgcctatctcgtgcctcgtcatcttttcgctgagaagtatgacaagatcatgattgacggcagggccatgacagaccgtgatttcagagtgtttgagtttgagattaaagtaaaaggacaggacatgctctcggacgccgccctcatggtgctgcaccgtgggaaccgcgtgagagacatcacgaagcactttcgtgatcaagcaagaatgagaaaaggaacccccgtggttggcgtgatcaacaacgccgacgttgggccnctcatcttctctggagaggcactcacctacaaagacattgtagtgtgtatggatggcgacaccatgccaggcctctttgcctataaagccgccaccaaagctggctactgtggaggagccgttcttgcgaaagacggagccgagactttcatcgtcggcactcactccgctggaggaaacggagttggttactgctcttgcgtttccaagtccatgctcctgcaaatgaaggcacacattgatcctgaaccacaccacgaa

SEQ ID NO: 198 - protein, 213 aa, Foot-and-mouth disease virus
SGAPPTDLQKMVMANTKPVELILDGKTVAICCATGVFGTAYLVPRHLFAEKYDKIMIDGRAMTDRDFRVFEFEIKVKGQDMLSDAALMVLHRGNRVRDITKHFRDQARMRKGTPVVGVINNADVGPLIFSGEALTYKDIVVCMDGDTMPGLFAYKAATKAGYCGGAVLAKDGAETFIVGTHSAGGNGVGYCSCVSKSMLLQMKAHIDPEPHHE

SEQ ID NO: 199 - DNA, 639 bp, Foot-and-mouth disease virus
  CDS (1)..(639)
  misc_feature (1)..(639): n is c, g, a, t/u
  misc_feature (1)..(639): R126P_SAT3
agcggatgcccaccgaccgacttgcaaaagatggtcatggcaaacgtaaagcctgttgagctcatcctcgacgggaagaccgttgcgctctgctgcgcgacgggagtgtttgggacagcttacctcgtgccccgtcatcttttcgcagagaagtatgacaagatcatgctggacggccgcgccctgacagacagtgactttagagtgtttgagtttgaggtgaaagtaaaaggacaggacatgctctctgatgccgcactcatggttctccactctggaaaccgtgtgcgcgatctcacgggacacttccgtgacaccatgaaactgtcgaaaggcagccccgtcgttggtgttgtcaacaacgctgatgtcggaccnctcatcttctcaggagacgcactgacctacaaagacctggtcgtttgtatggacggtgataccatgcctggactcttcgcttaccgcgcagggaccaaggttggatactgcggagctgccgttctcgcaaaggacggcgccaagactgtgatcgttggcacccactcagccggaggcaacggagtgggctactgctcctgcgtctcacgatccatgctcctgcagatgaaggcccacattgatccggctcctcacaccgag

SEQ ID NO: 200 - protein, 213 aa, Foot-and-mouth disease virus
SGCPPTDLQKMVMANVKPVELILDGKTVALCCATGVFGTAYLVPRHLFAEKYDKIMLDGRALTDSDFRVFEFEVKVKGQDMLSDAALMVLHSGNRVRDLTGHFRDTMKLSKGSPVVGVVNNADVGPLIFSGDALTYKDLVVCMDGDTMPGLFAYRAGTKVGYCGAAVLAKDGAKTVIVGTHSAGGNGVGYCSCVSRSMLLQMKAHIDPAPHTE

SEQ ID NO: 201 - DNA, 639 bp, Foot-and-mouth disease virus
  CDS (1)..(639)
  misc_feature (1)..(639): n is c, g, a, t/u
  misc_feature (1)..(639): T100P_A_2006
agtggtgcccccccgaccgacttgcaaaagatggtcatgggcaacaccaagcctgttgagctcatcctcgacgggaagacggtagccatctgttgcgctaccggagtgtttggcactgcttaccttgtgccacgtcatcttttcgcggagaagtatgacaagatcatgctggacggcagagccatgacagacagtgactacagagtgtttgagtttgagattaaagtaaaagggcaggacatgctctcagatgccgcgctcatggtgctccaccgtgggaatcgcgtgagagacatcccnaaacactttcgtgatacagcaagaatgaagaagggcacccccgttgtcggtgttatcaacaacgctgatgtcgggagactgattttctctggtgaggcccttacctacaaggacattgtagtgtgcatggatggagacaccatgcctggcctctttgcctacagagccgccaccaaggctggctattgtggaggagctgttcttgcaaaggacggagccgagaccttcatcgtcggcactcactccgcaggtggtaatggagttggatactgttcatgcgtttccaggtccatgctgctaaagatgaaggcacacatcgaccctgagccacaccacgag

SEQ ID NO: 202 - protein, 213 aa, Foot-and-mouth disease virus
SGAPPTDLQKMVMGNTKPVELILDGKTVAICCATGVFGTAYLVPRHLFAEKYDKIMLDGRAMTDSDYRVFEFEIKVKGQDMLSDAALMVLHRGNRVRDIPKHFRDTARMKKGTPVVGVINNADVGRLIFSGEALTYKDIVVCMDGDTMPGLFAYRAATKAGYCGGAVLAKDGAETFIVGTHSAGGNGVGYCSCVSRSMLLKMKAHIDPEPHHE

SEQ ID NO: 203 - DNA, 639 bp, Foot-and-mouth disease virus
  CDS (1)..(639)
  misc_feature (1)..(639): n is c, g, a, t/u
  misc_feature (1)..(639): T100P_A24
agtggtgccccaccgaccgacttgcaaaagttggtcatgggcaacaccaagcccgttgagctcatccttgacgggaagacggtagccatttgctgtgctactggagttttcggcactgcttacctcgtgcctcgtcatcttttcgcagaaaagtacgacaagatcatgttggacggcagagccatgacagatagtgactacagagtgtttgagtttgagattaaagtaaaaggacaggacatgctctcagacgctgcgctcatggtgctccaccgtgggaatcgcgtgagagacatcccnaaacactttcgtgacacagcaagaatgaagaaaggcacccccgtcgttggtgtgatcaacaacgccgatgtcgggagactgattttctctggtgaagcccttacctacaaggacattgtagtgtgcatggatggagacaccatgcctgggctctttgcctacaaagccgcaaccaaggctggttattgcggaggagccgtcctcgctaaggacggggctgacacgttcatcgttggcacccactccgctggaggcaatggcgttggatactgctcttgcgtttccaggtccatgcttctcaagatgaaggcacacgttgaccccgaaccacaccacgag

SEQ ID NO: 204 - protein, 213 aa, Foot-and-mouth disease virus
SGAPPTDLQKLVMGNTKPVELILDGKTVAICCATGVFGTAYLVPRHLFAEKYDKIMLDGRAMTDSDYRVFEFEIKVKGQDMLSDAALMVLHRGNRVRDIPKHFRDTARMKKGTPVVGVINNADVGRLIFSGEALTYKDIVVCMDGDTMPGLFAYKAATKAGYCGGAVLAKDGADTFIVGTHSAGGNGVGYCSCVSRSMLLKMKAHVDPEPHHE

SEQ ID NO: 205 - DNA, 639 bp, Foot-and-mouth disease virus
  CDS (1)..(639)
  misc_feature (1)..(639)
  misc_feature (1)..(639): T100P_Asia_leb_89
agtggtgccccaccgaccgacttgcaaaagatggtcatgagcaacactaagcctgttgagctcatccttgacggtaagacggtggccatctgctgcgccaccggagtgtttggtactgcctacctcgtgcctcgtcaccttttcgcagaaaagtacgacaggatcatgttggacggcagggccatgacagacagtgactacagagtgtttgagtttgagattaaagtaaaaggacaggacatgctctcagacgctgcgctcatggtgctccaccgtggcaaccgtgtgagagacatcccnaaacactttcgtgatacagcaagaatgaagaaaggtacccccgttgtcggcgtgatcaacaacgccgacgttgggagactgattttctccggtgaggccctcacctacaaggacattgtagtgtgcatggatggagacaccatgccgggcctatttgcctacagagccgctaccaaggctggctactgtggaggagccgttcttgccaaggacggagctgacacatttatcgtcggcactcactccgcaggaggcaatggagtcgggtactgctcatgcgtatctaggtccatgctcttgaagatgaaggcacacattgaccccgaaccacaccacgag

SEQ ID NO: 206 - protein, 213 aa, Foot-and-mouth disease virus
SGAPPTDLQKMVMSNTKPVELILDGKTVAICCATGVFGTAYLVPRHLFAEKYDRIMLDGRAMTDSDYRVFEFEIKVKGQDMLSDAALMVLHRGNRVRDIPKHFRDTARMKKGTPVVGVINNADVGRLIFSGEALTYKDIVVCMDGDTMPGLFAYRAATKAGYCGGAVLAKDGADTFIVGTHSAGGNGVGYCSCVSRSMLLKMKAHIDPEPHHE

SEQ ID NO: 207 - DNA, 639 bp, Foot-and-mouth disease virus
  CDS (1)..(639)
  misc_feature (1)..(639): n is c, g, a, t/u
  misc_feature (1)..(639): T100P_Asia1_Shamir
agtggtgccccaccgaccgacttgcaaaagatggtcatgagcaacactaagcctgttgagctcatccttgacggtaagacggtggccatctgctgcgccaccggagtgtttggtactgcctacctcgtgcctcgtcaccttttcgcagaaaagtacgacaggatcatgttggacggcagggccatgacagacagtgactacagagtgtttgagtttgagattaaagtaaaaggacaggacatgctctcagacgctgcgctcatggtgctccaccgtggcaaccgtgtgagagacatcccnaaacactttcgtgatacagcaagaatgaagaaaggtacccccgttgtcggcgtgatcaacaacgccgacgttgggagattgattttctccggtgaggccctcacctacaaggacattgtagtgtgcatggatggagacaccatgccgggcctatttgcctacagagccgctaccaaggctggctactgtggaggagccgttcttgccaaggacggagctgacacatttatcgtcggcactcactccgcaggaggcaatggagtcgggtactgctcatgcgtatctaggtccatgctcttgaagatgaaggcacacattgaccccgaaccacaccacgag

SEQ ID NO: 208 - protein, 213 aa, Foot-and-mouth disease virus; identical to SEQ ID NO: 206

SEQ ID NO: 209 - DNA, 639 bp, Foot-and-mouth disease virus
  CDS (1)..(639)
  misc_feature (1)..(639): n is c, g, a, t/u
  misc_feature (1)..(639): T100P_C3
agcggtgccccaccgaccgacttgcaaaagatggtcatgggcaacaccaagcctgttgagctgattctcgatgggaagacggtggccatctgctgcgccaccggagtgtttggcactgcttacctcgtgccgcgtcatcttttcgcagagaagtatgacaagatcatgttggacggcagagccatgacagacagtgactacagagtgtttgagtttgagattaaagtaaaaggacaggacatgctctcggacgccgcactcatggtgctacaccgtgggaatcgcgtgagagacatcccnaagcactttcgtgacacagcaagaatgaagaaaggcacccccgtcgtaggcgtgattaacaacgccgacgttgggagactgattttctctggtgaggcccttacctacaaagacattgtggtgtgcatggatggagacaccatgcctggcctctttgcctacagagccgccaccaaggctggttactgtggaggagccgtccttgccaaggatggagctgacacattcatcgtcggcactcactctgctggaggcaatggagttggttactgctcatgcgtttccagatccatgcttctcaagatgaaggcacacattgaccctgagccacaccacgag

SEQ ID NO: 210 - protein, 213 aa, Foot-and-mouth disease virus
SGAPPTDLQKMVMGNTKPVELILDGKTVAICCATGVFGTAYLVPRHLFAEKYDKIMLDGRAMTDSDYRVFEFEIKVKGQDMLSDAALMVLHRGNRVRDIPKHFRDTARMKKGTPVVGVINNADVGRLIFSGEALTYKDIVVCMDGDTMPGLFAYRAATKAGYCGGAVLAKDGADTFIVGTHSAGGNGVGYCSCVSRSMLLKMKAHIDPEPHHE

SEQ ID NO: 211 - DNA, 639 bp, Foot-and-mouth disease virus
  CDS (1)..(639)
  misc_feature (1)..(639): n is c, g, a, t/u
  misc_feature (1)..(639): T100P_O_pan_asia
agtggtgctccaccgactgacttgcaaaagatggtcatgggtaacaccaagcccgttgagctcatacttgacgggaagacagtagccatctgctgtgctactggagtgtttggcaccgcctacctcgtgcctcgtcatcttttcgcagagaagtatgacaagatcatgttggacggcagagccatgacagacagtgactacagagtgtttgagtttgagattaaagtaaaaggacaggacatgctctcagacgccgcgctcatggtgctccaccgtgggaatcgcgtgcgggacatcccnaaacacttccgtgatgtggcaagaatgaagaaaggaacccccgtcgttggtgttatcaacaacgccgatgtcgggagactgattttctctggtgaggccctcacctacaaggacattgtagtgtgcatggatggagacaccatgcctggcctctttgcctacaaggccgccaccaaggccggctactgtggaggagccgttctcgcaaaggacggagccgagactttcatcgtcggcacacactctgcgggcggcaacggagttggatactgctcctgcgtgtccaggtccatgctgctcaagatgaaggcacacatagatcctgaaccacaccatgaa

SEQ ID NO: 212 - protein, 213 aa, Foot-and-mouth disease virus
SGAPPTDLQKMVMGNTKPVELILDGKTVAICCATGVFGTAYLVPRHLFAEKYDKIMLDGRAMTDSDYRVFEFEIKVKGQDMLSDAALMVLHRGNRVRDIPKHFRDVARMKKGTPVVGVINNADVGRLIFSGEALTYKDIVVCMDGDTMPGLFAYKAATKAGYCGGAVLAKDGAETFIVGTHSAGGNGVGYCSCVSRSMLLKMKAHIDPEPHHE

SEQ ID NO: 213 - DNA, 639 bp, Foot-and-mouth disease virus
  CDS (1)..(639)
  misc_feature (1)..(639): n is c, g, a, t/u
  misc_feature (1)..(639): T100P_O1_Manissa
agtggtgccccaccgaccgacttgcagaagatggtcatgggcaacactaagcctgttgagctcatcctcgacgggaagacggtagccatctgctgtgctaccggagtgtttggcactgcctacctcgtacctcgtcacctcttcgcggagaagtacgacaagataatgttggacggtagagccatgacagacagtgactacagagtgtttgagtttgagattaaagtaaaaggacaggacatgctctcagacgctgcactcatggtgcttcaccgtgggaaccgcgtgagagacatcccnaaacattttcgtgacacagcaagaatgaagaaaggcacccccgttgtcggtgtgatcaacaacgccgacgttgggagactgattttctctggagaggcccttacctacaaagacattgtagtgtgcatggatggagacaccatgccgggcctgtttgcctacagagccgccaccaaggctggttactgcgggggagccgttctcgccaaggacggagccgacacattcatcgttggcactcactccgcaggtggtaacggagttggatactgctcgtgcgtgtccaggtccatgctcctgaaaatgaaggcacacattgaccctgaaccacaccacgag

SEQ ID NO: 214 - protein, 213 aa, Foot-and-mouth disease virus; identical to SEQ ID NO: 210

SEQ ID NO: 215 - DNA, 639 bp, Foot-and-mouth disease virus
  CDS (1)..(639)
  misc_feature (1)..(639): n is c, g, a, t/u
  misc_feature (1)..(639): T100P_SAT1
agcggatgtccaccgaccgacctgcagaggatggtcatggcaaacgtgaaacccgttgagctcatcctcgatgggaagaccgttgcgctctgctgcgctacgggagtgttcgggacggcttatctcgtgcctcgtcatcttttcgcagagaagtacgacaagatcatgctggacggccgtgccctgacagacagtgacttcagagtgtttgagtttgaggtgaaagtaaaaggacaggacatgctctcagatgccgcgctcatggttctccactccggaaaccgtgtgcgcgatctcccnggacacttccgtgacacaatgaaactgtcgaaaggcagtcccgtcgttggtgtggtcaacaacgccgacgtcggaagactcatcttctcaggagacgcactgacctacaaagacctggtcgtttgtatggacggtgacaccatgcccggactcttcgcataccgcgcggggaccaaggttggttattgtggagcagccgttcttgcaaaagacggcgccaagactgtgatcgtcggcacccactcagccggtggcaacggagtaggctactgctcctgtgtctcacgatccatgctcctgcagatgaaagcccacatcgacccggccccccacaccgag

SEQ ID NO: 216 - protein, 213 aa, Foot-and-mouth disease virus
SGCPPTDLQRMVMANVKPVELILDGKTVALCCATGVFGTAYLVPRHLFAEKYDKIMLDGRALTDSDFRVFEFEVKVKGQDMLSDAALMVLHSGNRVRDLPGHFRDTMKLSKGSPVVGVVNNADVGRLIFSGDALTYKDLVVCMDGDTMPGLFAYRAGTKVGYCGAAVLAKDGAKTVIVGTHSAGGNGVGYCSCVSRSMLLQMKAHIDPAPHTE

SEQ ID NO: 217 - DNA, 639 bp, Foot-and-mouth disease virus
  CDS (1)..(639)
  misc_feature (1)..(639): n is c, g, a, t/u
  misc_feature (1)..(639): T100P_SAT_Egypt_2010
agtggagcgccacccaccgacttgcaaaagatggtgatggccaacaccaaaccagtcgagctcatactcgatggtaagacagtggcgatctgctgtgccactggagtgtttgggactgcctatctcgtgcctcgtcatcttttcgctgagaagtatgacaagatcatgattgacggcagggccatgacagaccgtgatttcagagtgtttgagtttgagattaaagtaaaaggacaggacatgctctcggacgccgccctcatggtgctgcaccgtgggaaccgcgtgagagacatcccnaagcactttcgtgatcaagcaagaatgagaaaaggaacccccgtggttggcgtgatcaacaacgccgacgttgggagactcatcttctctggagaggcactcacctacaaagacattgtagtgtgtatggatggcgacaccatgccaggcctctttgcctataaagccgccaccaaagctggctactgtggaggagccgttcttgcgaaagacggagccgagactttcatcgtcggcactcactccgctggaggaaacggagttggttactgctcttgcgtttccaagtccatgctcctgcaaatgaaggcacacattgatcctgaaccacaccacgaa

SEQ ID NO: 218 - protein, 213 aa, Foot-and-mouth disease virus
SGAPPTDLQKMVMANTKPVELILDGKTVAICCATGVFGTAYLVPRHLFAEKYDKIMIDGRAMTDRDFRVFEFEIKVKGQDMLSDAALMVLHRGNRVRDIPKHFRDQARMRKGTPVVGVINNADVGRLIFSGEALTYKDIVVCMDGDTMPGLFAYKAATKAGYCGGAVLAKDGAETFIVGTHSAGGNGVGYCSCVSKSMLLQMKAHIDPEPHHE

SEQ ID NO: 219 - DNA, 639 bp, Foot-and-mouth disease virus
  CDS (1)..(639)
  misc_feature (1)..(639): n is c, g, a, t/u
  misc_feature (1)..(639): T100P_SAT3
agcggatgcccaccgaccgacttgcaaaagatggtcatggcaaacgtaaagcctgttgagctcatcctcgacgggaagaccgttgcgctctgctgcgcgacgggagtgtttgggacagcttacctcgtgccccgtcatcttttcgcagagaagtatgacaagatcatgctggacggccgcgccctgacagacagtgactttagagtgtttgagtttgaggtgaaagtaaaaggacaggacatgctctctgatgccgcactcatggttctccactctggaaaccgtgtgcgcgatctcccnggacacttccgtgacaccatgaaactgtcgaaaggcagccccgtcgttggtgttgtcaacaacgctgatgtcggaagactcatcttctcaggagacgcactgacctacaaagacctggtcgtttgtatggacggtgataccatgcctggactcttcgcttaccgcgcagggaccaaggttggatactgcggagctgccgttctcgcaaaggacggcgccaagactgtgatcgttggcacccactcagccggaggcaacggagtgggctactgctcctgcgtctcacgatccatgctcctgcagatgaaggcccacattgatccggctcctcacaccgag

SEQ ID NO: 220 - protein, 213 aa, Foot-and-mouth disease virus
SGCPPTDLQKMVMANVKPVELILDGKTVALCCATGVFGTAYLVPRHLFAEKYDKIMLDGRALTDSDFRVFEFEVKVKGQDMLSDAALMVLHSGNRVRDLPGHFRDTMKLSKGSPVVGVVNNADVGRLIFSGDALTYKDLVVCMDGDTMPGLFAYRAGTKVGYCGAAVLAKDGAKTVIVGTHSAGGNGVGYCSCVSRSMLLQMKAHIDPAPHTE

SEQ ID NO: 221 - DNA, 639 bp, Foot-and-mouth disease virus
  CDS (1)..(639)
  misc_feature (1)..(639): n is c, g, a, t/u
  misc_feature (1)..(639): V124P_A_2006
agtggtgcccccccgaccgacttgcaaaagatggtcatgggcaacaccaagcctgttgagctcatcctcgacgggaagacggtagccatctgttgcgctaccggagtgtttggcactgcttaccttgtgccacgtcatcttttcgcggagaagtatgacaagatcatgctggacggcagagccatgacagacagtgactacagagtgtttgagtttgagattaaagtaaaagggcaggacatgctctcagatgccgcgctcatggtgctccaccgtgggaatcgcgtgagagacatcacgaaacactttcgtgatacagcaagaatgaagaagggcacccccgttgtcggtgttatcaacaacgctgatccngggagactgattttctctggtgaggcccttacctacaaggacattgtagtgtgcatggatggagacaccatgcctggcctctttgcctacagagccgccaccaaggctggctattgtggaggagctgttcttgcaaaggacggagccgagaccttcatcgtcggcactcactccgcaggtggtaatggagttggatactgttcatgcgtttccaggtccatgctgctaaagatgaaggcacacatcgaccctgagccacaccacgag

SEQ ID NO: 222 - protein, 213 aa, Foot-and-mouth disease virus
SGAPPTDLQKMVMGNTKPVELILDGKTVAICCATGVFGTAYLVPRHLFAEKYDKIMLDGRAMTDSDYRVFEFEIKVKGQDMLSDAALMVLHRGNRVRDITKHFRDTARMKKGTPVVGVINNADPGRLIFSGEALTYKDIVVCMDGDTMPGLFAYRAATKAGYCGGAVLAKDGAETFIVGTHSAGGNGVGYCSCVSRSMLLKMKAHIDPEPHHE

SEQ ID NO: 223 - DNA, 639 bp, Foot-and-mouth disease virus
  CDS (1)..(639)
  misc_feature (1)..(639): n is c, g, a, t/u
  misc_feature (1)..(639): V124P_A24
agtggtgccccaccgaccgacttgcaaaagttggtcatgggcaacaccaagcccgttgagctcatccttgacgggaagacggtagccatttgctgtgctactggagttttcggcactgcttacctcgtgcctcgtcatcttttcgcagaaaagtacgacaagatcatgttggacggcagagccatgacagatagtgactacagagtgtttgagtttgagattaaagtaaaaggacaggacatgctctcagacgctgcgctcatggtgctccaccgtgggaatcgcgtgagagacatcacgaaacactttcgtgacacagcaagaatgaagaaaggcacccccgtcgttggtgtgatcaacaacgccgatccngggagactgattttctctggtgaagcccttacctacaaggacattgtagtgtgcatggatggagacaccatgcctgggctctttgcctacaaagccgcaaccaaggctggttattgcggaggagccgtcctcgctaaggacggggctgacacgttcatcgttggcacccactccgctggaggcaatggcgttggatactgctcttgcgtttccaggtccatgcttctcaagatgaaggcacacgttgaccccgaaccacaccacgag

SEQ ID NO: 224 - protein, 213 aa, Foot-and-mouth disease virus
SGAPPTDLQKLVMGNTKPVELILDGKTVAICCATGVFGTAYLVPRHLFAEKYDKIMLDGRAMTDSDYRVFEFEIKVKGQDMLSDAALMVLHRGNRVRDITKHFRDTARMKKGTPVVGVINNADPGRLIFSGEALTYKDIVVCMDGDTMPGLFAYKAATKAGYCGGAVLAKDGADTFIVGTHSAGGNGVGYCSCVSRSMLLKMKAHVDPEPHHE

SEQ ID NO: 225 - DNA, 639 bp, Foot-and-mouth disease virus
  CDS (1)..(639)
  misc_feature (1)..(639): n is c, g, a, t/u
  misc_feature (1)..(639): V124P_Asia_leb_89
agtggtgccccaccgaccgacttgcaaaagatggtcatgagcaacactaagcctgttgagctcatccttgacggtaagacggtggccatctgctgcgccaccggagtgtttggtactgcctacctcgtgcctcgtcaccttttcgcagaaaagtacgacaggatcatgttggacggcagggccatgacagacagtgactacagagtgtttgagtttgagattaaagtaaaaggacaggacatgctctcagacgctgcgctcatggtgctccaccgtggcaaccgtgtgagagacatcacgaaacactttcgtgatacagcaagaatgaagaaaggtacccccgttgtcggcgtgatcaacaacgccgacccngggagactgattttctccggtgaggccctcacctacaaggacattgtagtgtgcatggatggagacaccatgccgggcctatttgcctacagagccgctaccaaggctggctactgtggaggagccgttcttgccaaggacggagctgacacatttatcgtcggcactcactccgcaggaggcaatggagtcgggtactgctcatgcgtatctaggtccatgctcttgaagatgaaggcacacattgaccccgaaccacaccacgag

SEQ ID NO: 226 - protein, 213 aa, Foot-and-mouth disease virus
SGAPPTDLQKMVMSNTKPVELILDGKTVAICCATGVFGTAYLVPRHLFAEKYDRIMLDGRAMTDSDYRVFEFEIKVKGQDMLSDAALMVLHRGNRVRDITKHFRDTARMKKGTPVVGVINNADPGRLIFSGEALTYKDIVVCMDGDTMPGLFAYRAATKAGYCGGAVLAKDGADTFIVGTHSAGGNGVGYCSCVSRSMLLKMKAHIDPEPHHE

SEQ ID NO: 227 - DNA, 639 bp, Foot-and-mouth disease virus
  CDS (1)..(639)
  misc_feature (1)..(639): n is c, g, a, t/u
  misc_feature (1)..(639): V124P_Asia1_Shamir
agtggtgccccaccgaccgacttgcaaaagatggtcatgagcaacactaagcctgttgagctcatccttgacggtaagacggtggccatctgctgcgccaccggagtgtttggtactgcctacctcgtgcctcgtcaccttttcgcagaaaagtacgacaggatcatgttggacggcagggccatgacagacagtgactacagagtgtttgagtttgagattaaagtaaaaggacaggacatgctctcagacgctgcgctcatggtgctccaccgtggcaaccgtgtgagagacatcacgaaacactttcgtgatacagcaagaatgaagaaaggtacccccgttgtcggcgtgatcaacaacgccgacccngggagattgattttctccggtgaggccctcacctacaaggacattgtagtgtgcatggatggagacaccatgccgggcctatttgcctacagagccgctaccaaggctggctactgtggaggagccgttcttgccaaggacggagctgacacatttatcgtcggcactcactccgcaggaggcaatggagtcgggtactgctcatgcgtatctaggtccatgctcttgaagatgaaggcacacattgaccccgaaccacaccacgag

SEQ ID NO: 228 - protein, 213 aa, Foot-and-mouth disease virus; identical to SEQ ID NO: 226

SEQ ID NO: 229 - DNA, 639 bp, Foot-and-mouth disease virus
  CDS (1)..(639)
  misc_feature (1)..(639): n is c, g, a, t/u
  misc_feature (1)..(639): V124P_C3
agcggtgccccaccgaccgacttgcaaaagatggtcatgggcaacaccaagcctgttgagctgattctcgatgggaagacggtggccatctgctgcgccaccggagtgtttggcactgcttacctcgtgccgcgtcatcttttcgcagagaagtatgacaagatcatgttggacggcagagccatgacagacagtgactacagagtgtttgagtttgagattaaagtaaaaggacaggacatgctctcggacgccgcactcatggtgctacaccgtgggaatcgcgtgagagacatcacgaagcactttcgtgacacagcaagaatgaagaaaggcacccccgtcgtaggcgtgattaacaacgccgacccngggagactgattttctctggtgaggcccttacctacaaagacattgtggtgtgcatggatggagacaccatgcctggcctctttgcctacagagccgccaccaaggctggttactgtggaggagccgtccttgccaaggatggagctgacacattcatcgtcggcactcactctgctggaggcaatggagttggttactgctcatgcgtttccagatccatgcttctcaagatgaaggcacacattgaccctgagccacaccacgag

SEQ ID NO: 230 - protein, 213 aa, Foot-and-mouth disease virus
SGAPPTDLQKMVMGNTKPVELILDGKTVAICCATGVFGTAYLVPRHLFAEKYDKIMLDGRAMTDSDYRVFEFEIKVKGQDMLSDAALMVLHRGNRVRDITKHFRDTARMKKGTPVVGVINNADPGRLIFSGEALTYKDIVVCMDGDTMPGLFAYRAATKAGYCGGAVLAKDGADTFIVGTHSAGGNGVGYCSCVSRSMLLKMKAHIDPEPHHE

SEQ ID NO: 231 - DNA, 639 bp, Foot-and-mouth disease virus
  CDS (1)..(639)
  misc_feature (1)..(639): n is c, g, a, t/u
  misc_feature (1)..(639): V124P_O-pan_asia
agtggtgctccaccgactgacttgcaaaagatggtcatgggtaacaccaagcccgttgagctcatacttgacgggaagacagtagccatctgctgtgctactggagtgtttggcaccgcctacctcgtgcctcgtcatcttttcgcagagaagtatgacaagatcatgttggacggcagagccatgacagacagtgactacagagtgtttgagtttgagattaaagtaaaaggacaggacatgctctcagacgccgcgctcatggtgctccaccgtgggaatcgcgtgcgggacatcacgaaacacttccgtgatgtggcaagaatgaagaaaggaacccccgtcgttggtgttatcaacaacgccgatcccgggagactgattttctctggtgaggccctcacctacaaggacattgtagtgtgcatggatggagacaccatgcctggcctctttgcctacaaggccgccaccaaggccggctactgtggaggagccgttctcgcaaaggacggagccgagactttcatcgtcggcacacactctgcgggcggcaacggagttggatactgctcctgcgtgtccaggtccatgctgctcaagatgaaggcacacatagatcctgaaccacaccatgaa

SEQ ID NO: 232 - protein, 213 aa, Foot-and-mouth disease virus
SGAPPTDLQKMVMGNTKPVELILDGKTVAICCATGVFGTAYLVPRHLFAEKYDKIMLDGRAMTDSDYRVFEFEIKVKGQDMLSDAALMVLHRGNRVRDITKHFRDVARMKKGTPVVGVINNADPGRLIFSGEALTYKDIVVCMDGDTMPGLFAYKAATKAGYCGGAVLAKDGAETFIVGTHSAGGNGVGYCSCVSRSMLLKMKAHIDPEPHHE

SEQ ID NO: 233 - DNA, 639 bp, Foot-and-mouth disease virus
  CDS (1)..(639)
  misc_feature (1)..(639): n is c, g, a, t/u
  misc_feature (1)..(639): V124P_01_Manissa
agtggtgccccaccgaccgacttgcagaagatggtcatgggcaacactaagcctgttgagctcatcctcgacgggaagacggtagccatctgctgtgctaccggagtgtttggcactgcctacctcgtacctcgtcacctcttcgcggagaagtacgacaagataatgttggacggtagagccatgacagacagtgactacagagtgtttgagtttgagattaaagtaaaaggacaggacatgctctcagacgctgcactcatggtgcttcaccgtgggaaccgcgtgagagacatcacgaaacattttcgtgacacagcaagaatgaagaaaggcacccccgttgtcggtgtgatcaacaacgccgacccngggagactgattttctctggagaggcccttacctacaaagacattgtagtgtgcatggatggagacaccatgccgggcctgtttgcctacagagccgccaccaaggctggttactgcgggggagccgttctcgccaaggacggagccgacacattcatcgttggcactcactccgcaggtggtaacggagttggatactgctcgtgcgtgtccaggtccatgctcctgaaaatgaaggcacacattgaccctgaaccacaccacgag

SEQ ID NO: 234 - protein, 213 aa, Foot-and-mouth disease virus; identical to SEQ ID NO: 230

SEQ ID NO: 235 - DNA, 639 bp, Foot-and-mouth disease virus
  CDS (1)..(639)
  misc_feature (1)..(639): n is c, g, a, t/u
  misc_feature (1)..(639): V124P_SAT1
agcggatgtccaccgaccgacctgcagaggatggtcatggcaaacgtgaaacccgttgagctcatcctcgatgggaagaccgttgcgctctgctgcgctacgggagtgttcgggacggcttatctcgtgcctcgtcatcttttcgcagagaagtacgacaagatcatgctggacggccgtgccctgacagacagtgacttcagagtgtttgagtttgaggtgaaagtaaaaggacaggacatgctctcagatgccgcgctcatggttctccactccggaaaccgtgtgcgcgatctcacgggacacttccgtgacacaatgaaactgtcgaaaggcagtcccgtcgttggtgtggtcaacaacgccgacccnggaagactcatcttctcaggagacgcactgacctacaaagacctggtcgtttgtatggacggtgacaccatgcccggactcttcgcataccgcgcggggaccaaggttggttattgtggagcagccgttcttgcaaaagacggcgccaagactgtgatcgtcggcacccactcagccggtggcaacggagtaggctactgctcctgtgtctcacgatccatgctcctgcagatgaaagcccacatcgacccggccccccacaccgag

SEQ ID NO: 236 - protein, 213 aa, Foot-and-mouth disease virus
SGCPPTDLQRMVMANVKPVELILDGKTVALCCATGVFGTAYLVPRHLFAEKYDKIMLDGRALTDSDFRVFEFEVKVKGQDMLSDAALMVLHSGNRVRDLTGHFRDTMKLSKGSPVVGVVNNADPGRLIFSGDALTYKDLVVCMDGDTMPGLFAYRAGTKVGYCGAAVLAKDGAKTVIVGTHSAGGNGVGYCSCVSRSMLLQMKAHIDPAPHTE

SEQ ID NO: 237 - DNA, 639 bp, Foot-and-mouth disease virus
  CDS (1)..(639)
  misc_feature (1)..(639): n is c, g, a, t/u
  misc_feature (1)..(639): V124P_SAT2_Egypt_2010
agtggagcgccacccaccgacttgcaaaagatggtgatggccaacaccaaaccagtcgagctcatactcgatggtaagacagtggcgatctgctgtgccactggagtgtttgggactgcctatctcgtgcctcgtcatcttttcgctgagaagtatgacaagatcatgattgacggcagggccatgacagaccgtgatttcagagtgtttgagtttgagattaaagtaaaaggacaggacatgctctcggacgccgccctcatggtgctgcaccgtgggaaccgcgtgagagacatcacgaagcactttcgtgatcaagcaagaatgagaaaaggaacccccgtggttggcgtgatcaacaacgccgacccngggagactcatcttctctggagaggcactcacctacaaagacattgtagtgtgtatggatggcgacaccatgccaggcctctttgcctataaagccgccaccaaagctggctactgtggaggagccgttcttgcgaaagacggagccgagactttcatcgtcggcactcactccgctggaggaaacggagttggttactgctcttgcgtttccaagtccatgctcctgcaaatgaaggcacacattgatcctgaaccacaccacgaa

SEQ ID NO: 238 - protein, 213 aa, Foot-and-mouth disease virus
SGAPPTDLQKMVMANTKPVELILDGKTVAICCATGVFGTAYLVPRHLFAEKYDKIMIDGRAMTDRDFRVFEFEIKVKGQDMLSDAALMVLHRGNRVRDITKHFRDQARMRKGTPVVGVINNADPGRLIFSGEALTYKDIVVCMDGDTMPGLFAYKAATKAGYCGGAVLAKDGAETFIVGTHSAGGNGVGYCSCVSKSMLLQMKAHIDPEPHHE

SEQ ID NO: 239 - DNA, 639 bp, Foot-and-mouth disease virus
  CDS (1)..(639)
  misc_feature (1)..(639): n is c, g, a, t/u
  misc_feature (1)..(639): V124P_SAT3
agcggatgcccaccgaccgacttgcaaaagatggtcatggcaaacgtaaagcctgttgagctcatcctcgacgggaagaccgttgcgctctgctgcgcgacgggagtgtttgggacagcttacctcgtgccccgtcatcttttcgcagagaagtatgacaagatcatgctggacggccgcgccctgacagacagtgactttagagtgtttgagtttgaggtgaaagtaaaaggacaggacatgctctctgatgccgcactcatggttctccactctggaaaccgtgtgcgcgatctcacgggacacttccgtgacaccatgaaactgtcgaaaggcagccccgtcgttggtgttgtcaacaacgctgatccnggaagactcatcttctcaggagacgcactgacctacaaagacctggtcgtttgtatggacggtgataccatgcctggactcttcgcttaccgcgcagggaccaaggttggatactgcggagctgccgttctcgcaaaggacggcgccaagactgtgatcgttggcacccactcagccggaggcaacggagtgggctactgctcctgcgtctcacgatccatgctcctgcagatgaaggcccacattgatccggctcctcacaccgag

SEQ ID NO: 240 - protein, 213 aa, Foot-and-mouth disease virus
SGCPPTDLQKMVMANVKPVELILDGKTVALCCATGVFGTAYLVPRHLFAEKYDKIMLDGRALTDSDFRVFEFEVKVKGQDMLSDAALMVLHSGNRVRDLTGHFRDTMKLSKGSPVVGVVNNADPGRLIFSGDALTYKDLVVCMDGDTMPGLFAYRAGTKVGYCGAAVLAKDGAKTVIVGTHSAGGNGVGYCSCVSRSMLLQMKAHIDPAPHTE

SEQ ID NO: 241 - DNA, 639 bp, Foot-and-mouth disease virus
  CDS (1)..(639)
  misc_feature (1)..(639): n is c, g, a, t/u
  misc_feature (1)..(639): I22P/L127P_A_2006
agtggtgcccccccgaccgacttgcaaaagatggtcatgggcaacaccaagcctgttgagctcccnctcgacgggaagacggtagccatctgttgcgctaccggagtgtttggcactgcttaccttgtgccacgtcatcttttcgcggagaagtatgacaagatcatgctggacggcagagccatgacagacagtgactacagagtgtttgagtttgagattaaagtaaaagggcaggacatgctctcagatgccgcgctcatggtgctccaccgtgggaatcgcgtgagagacatcacgaaacactttcgtgatacagcaagaatgaagaagggcacccccgttgtcggtgttatcaacaacgctgatgtcgggagaccnattttctctggtgaggcccttacctacaaggacattgtagtgtgcatggatggagacaccatgcctggcctctttgcctacagagccgccaccaaggctggctattgtggaggagctgttcttgcaaaggacggagccgagaccttcatcgtcggcactcactccgcaggtggtaatggagttggatactgttcatgcgtttccaggtccatgctgctaaagatgaaggcacacatcgaccctgagccacaccacgag

SEQ ID NO: 242 - protein, 213 aa, Foot-and-mouth disease virus
SGAPPTDLQKMVMGNTKPVELPLDGKTVAICCATGVFGTAYLVPRHLFAEKYDKIMLDGRAMTDSDYRVFEFEIKVKGQDMLSDAALMVLHRGNRVRDITKHFRDTARMKKGTPVVGVINNADVGRPIFSGEALTYKDIVVCMDGDTMPGLFAYRAATKAGYCGGAVLAKDGAETFIVGTHSAGGNGVGYCSCVSRSMLLKMKAHIDPEPHHE

SEQ ID NO: 243 - DNA, 639 bp, Foot-and-mouth disease virus
  CDS (1)..(639)
  misc_feature (1)..(639): n is c, g, a, t/u
  misc_feature (1)..(639): I22P/L127P_A24
agtggtgccccaccgaccgacttgcaaaagttggtcatgggcaacaccaagcccgttgagctcccncttgacgggaagacggtagccatttgctgtgctactggagttttcggcactgcttacctcgtgcctcgtcatcttttcgcagaaaagtacgacaagatcatgttggacggcagagccatgacagatagtgactacagagtgtttgagtttgagattaaagtaaaaggacaggacatgctctcagacgctgcgctcatggtgctccaccgtgggaatcgcgtgagagacatcacgaaacactttcgtgacacagcaagaatgaagaaaggcacccccgtcgttggtgtgatcaacaacgccgatgtcgggagaccnattttctctggtgaagcccttacctacaaggacattgtagtgtgcatggatggagacaccatgcctgggctctttgcctacaaagccgcaaccaaggctggttattgcggaggagccgtcctcgctaaggacggggctgacacgttcatcgttggcacccactccgctggaggcaatggcgttggatactgctcttgcgtttccaggtccatgcttctcaagatgaaggcacacgttgaccccgaaccacaccacgag

SEQ ID NO: 244 - protein, 213 aa, Foot-and-mouth disease virus
SGAPPTDLQKLVMGNTKPVELPLDGKTVAICCATGVFGTAYLVPRHLFAEKYDKIMLDGRAMTDSDYRVFEFEIKVKGQDMLSDAALMVLHRGNRVRDITKHFRDTARMKKGTPVVGVINNADVGRPIFSGEALTYKDIVVCMDGDTMPGLFAYKAATKAGYCGGAVLAKDGADTFIVGTHSAGGNGVGYCSCVSRSMLLKMKAHVDPEPHHE

SEQ ID NO: 245 - DNA, 639 bp, Foot-and-mouth disease virus
  CDS (1)..(639)
  misc_feature (1)..(639): n is c, g, a, t/u
  misc_feature (1)..(639): I22P/L127P_asia_leb_89
agtggtgccccaccgaccgacttgcaaaagatggtcatgagcaacactaagcctgttgagctcccncttgacggtaagacggtggccatctgctgcgccaccggagtgtttggtactgcctacctcgtgcctcgtcaccttttcgcagaaaagtacgacaggatcatgttggacggcagggccatgacagacagtgactacagagtgtttgagtttgagattaaagtaaaaggacaggacatgctctcagacgctgcgctcatggtgctccaccgtggcaaccgtgtgagagacatcacgaaacactttcgtgatacagcaagaatgaagaaaggtacccccgttgtcggcgtgatcaacaacgccgacgttgggagaccnattttctccggtgaggccctcacctacaaggacattgtagtgtgcatggatggagacaccatgccgggcctatttgcctacagagccgctaccaaggctggctactgtggaggagccgttcttgccaaggacggagctgacacatttatcgtcggcactcactccgcaggaggcaatggagtcgggtactgctcatgcgtatctaggtccatgctcttgaagatgaaggcacacattgaccccgaaccacaccacgag

SEQ ID NO: 246 - protein, 213 aa, Foot-and-mouth disease virus
SGAPPTDLQKMVMSNTKPVELPLDGKTVAICCATGVFGTAYLVPRHLFAEKYDRIMLDGRAMTDSDYRVFEFEIKVKGQDMLSDAALMVLHRGNRVRDITKHFRDTARMKKGTPVVGVINNADVGRPIFSGEALTYKDIVVCMDGDTMPGLFAYRAATKAGYCGGAVLAKDGADTFIVGTHSAGGNGVGYCSCVSRSMLLKMKAHIDPEPHHE

SEQ ID NO: 247 - DNA, 639 bp, Foot-and-mouth disease virus; identical to SEQ ID NO: 245
  CDS (1)..(639)
  misc_feature (1)..(639): n is c, g, a, t/u
  misc_feature (1)..(639): I22P/L127P_Asia1_Shamir

SEQ ID NO: 248 - protein, 213 aa, Foot-and-mouth disease virus; identical to SEQ ID NO: 246

SEQ ID NO: 249 - DNA, 639 bp, Foot-and-mouth disease virus
  CDS (1)..(639)
  misc_feature (1)..(639): n is c, g, a, t/u
  misc_feature (1)..(639): I22P/L127_C3
agcggtgccccaccgaccgacttgcaaaagatggtcatgggcaacaccaagcctgttgagctgccnctcgatgggaagacggtggccatctgctgcgccaccggagtgtttggcactgcttacctcgtgccgcgtcatcttttcgcagagaagtatgacaagatcatgttggacggcagagccatgacagacagtgactacagagtgtttgagtttgagattaaagtaaaaggacaggacatgctctcggacgccgcactcatggtgctacaccgtgggaatcgcgtgagagacatcacgaagcactttcgtgacacagcaagaatgaagaaaggcacccccgtcgtaggcgtgattaacaacgccgacgttgggagaccnattttctctggtgaggcccttacctacaaagacattgtggtgtgcatggatggagacaccatgcctggcctctttgcctacagagccgccaccaaggctggttactgtggaggagccgtccttgccaaggatggagctgacacattcatcgtcggcactcactctgctggaggcaatggagttggttactgctcatgcgtttccagatccatgcttctcaagatgaaggcacacattgaccctgagccacaccacgag

SEQ ID NO: 250 - protein, 213 aa, Foot-and-mouth disease virus
SGAPPTDLQKMVMGNTKPVELPLDGKTVAICCATGVFGTAYLVPRHLFAEKYDKIMLDGRAMTDSDYRVFEFEIKVKGQDMLSDAALMVLHRGNRVRDITKHFRDTARMKKGTPVVGVINNADVGRPIFSGEALTYKDIVVCMDGDTMPGLFAYRAATKAGYCGGAVLAKDGADTFIVGTHSAGGNGVGYCSCVSRSMLLKMKAHIDPEPHHE

SEQ ID NO: 251 - DNA, 639 bp, Foot-and-mouth disease virus
  CDS (1)..(639)
  misc_feature (1)..(639): n is c, g, a, t/u
  misc_feature (1)..(639): I22P/L127P_O_pan_asia
agtggtgctccaccgactgacttgcaaaagatggtcatgggtaacaccaagcccgttgagctcccncttgacgggaagacagtagccatctgctgtgctactggagtgtttggcaccgcctacctcgtgcctcgtcatcttttcgcagagaagtatgacaagatcatgttggacggcagagccatgacagacagtgactacagagtgtttgagtttgagattaaagtaaaaggacaggacatgctctcagacgccgcgctcatggtgctccaccgtgggaatcgcgtgcgggacatcacgaaacacttccgtgatgtggcaagaatgaagaaaggaacccccgtcgttggtgttatcaacaacgccgatgtcgggagaccnattttctctggtgaggccctcacctacaaggacattgtagtgtgcatggatggagacaccatgcctggcctctttgcctacaaggccgccaccaaggccggctactgtggaggagccgttctcgcaaaggacggagccgagactttcatcgtcggcacacactctgcgggcggcaacggagttggatactgctcctgcgtgtccaggtccatgctgctcaagatgaaggcacacatagatcctgaaccacaccatgaa

SEQ ID NO: 252 - protein, 213 aa, Foot-and-mouth disease virus
SGAPPTDLQKMVMGNTKPVELPLDGKTVAICCATGVFGTAYLVPRHLFAEKYDKIMLDGRAMTDSDYRVFEFEIKVKGQDMLSDAALMVLHRGNRVRDITKHFRDVARMKKGTPVVGVINNADVGRPIFSGEALTYKDIVVCMDGDTMPGLFAYKAATKAGYCGGAVLAKDGAETFIVGTHSAGGNGVGYCSCVSRSMLLKMKAHIDPEPHHE

SEQ ID NO: 253 - DNA, 639 bp, Foot-and-mouth disease virus
  CDS (1)..(639)
  misc_feature (1)..(639): I22P/L127P_01_Manissa
  misc_feature (1)..(639): n is c, g, a, t/u
agtggtgccccaccgaccgacttgcagaagatggtcatgggcaacactaagcctgttgagctcccnctcgacgggaagacggtagccatctgctgtgctaccggagtgtttggcactgcctacctcgtacctcgtcacctcttcgcggagaagtacgacaagataatgttggacggtagagccatgacagacagtgactacagagtgtttgagtttgagattaaagtaaaaggacaggacatgctctcagacgctgcactcatggtgcttcaccgtgggaaccgcgtgagagacatcacgaaacattttcgtgacacagcaagaatgaagaaaggcacccccgttgtcggtgtgatcaacaacgccgacgttgggagaccnattttctctggagaggcccttacctacaaagacattgtagtgtgcatggatggagacaccatgccgggcctgtttgcctacagagccgccaccaaggctggttactgcgggggagccgttctcgccaaggacggagccgacacattcatcgttggcactcactccgcaggtggtaacggagttggatactgctcgtgcgtgtccaggtccatgctcctgaaaatgaaggcacacattgaccctgaaccacaccacgag

SEQ ID NO: 254 - protein, 213 aa, Foot-and-mouth disease virus; identical to SEQ ID NO: 250

SEQ ID NO: 255 - DNA, 639 bp, Foot-and-mouth disease virus
  CDS (1)..(639)
  misc_feature (1)..(639): n is c, g, a, t/u
  misc_feature (1)..(639): I22P/L127P_SAT1
agcggatgtccaccgaccgacctgcagaggatggtcatggcaaacgtgaaacccgttgagctcccnctcgatgggaagaccgttgcgctctgctgcgctacgggagtgttcgggacggcttatctcgtgcctcgtcatcttttcgcagagaagtacgacaagatcatgctggacggccgtgccctgacagacagtgacttcagagtgtttgagtttgaggtgaaagtaaaaggacaggacatgctctcagatgccgcgctcatggttctccactccggaaaccgtgtgcgcgatctcacgggacacttccgtgacacaatgaaactgtcgaaaggcagtcccgtcgttggtgtggtcaacaacgccgacgtcggaagaccnatcttctcaggagacgcactgacctacaaagacctggtcgtttgtatggacggtgacaccatgcccggactcttcgcataccgcgcggggaccaaggttggttattgtggagcagccgttcttgcaaaagacggcgccaagactgtgatcgtcggcacccactcagccggtggcaacggagtaggctactgctcctgtgtctcacgatccatgctcctgcagatgaaagcccacatcgacccggccccccacaccgag

SEQ ID NO: 256 - protein, 213 aa, Foot-and-mouth disease virus
SGCPPTDLQRMVMANVKPVELPLDGKTVALCCATGVFGTAYLVPRHLFAEKYDKIMLDGRALTDSDFRVFEFEVKVKGQDMLSDAALMVLHSGNRVRDLTGHFRDTMKLSKGSPVVGVVNNADVGRPIFSGDALTYKDLVVCMDGDTMPGLFAYRAGTKVGYCGAAVLAKDGAKTVIVGTHSAGGNGVGYCSCVSRSMLLQMKAHIDPAPHTE

SEQ ID NO: 257 - DNA, 639 bp, Foot-and-mouth disease virus
  CDS (1)..(639)
  misc_feature (1)..(639): n is c, g, a, t/u
  misc_feature (1)..(639): I22P/L127P_SAT2_Egypt_2010
agtggagcgccacccaccgacttgcaaaagatggtgatggccaacaccaaaccagtcgagctcccnctcgatggtaagacagtggcgatctgctgtgccactggagtgtttgggactgcctatctcgtgcctcgtcatcttttcgctgagaagtatgacaagatcatgattgacggcagggccatgacagaccgtgatttcagagtgtttgagtttgagattaaagtaaaaggacaggacatgctctcggacgccgccctcatggtgctgcaccgtgggaaccgcgtgagagacatcacgaagcactttcgtgatcaagcaagaatgagaaaaggaacccccgtggttggcgtgatcaacaacgccgacgttgggagaccnatcttctctggagaggcactcacctacaaagacattgtagtgtgtatggatggcgacaccatgccaggcctctttgcctataaagccgccaccaaagctggctactgtggaggagccgttcttgcgaaagacggagccgagactttcatcgtcggcactcactccgctggaggaaacggagttggttactgctcttgcgtttccaagtccatgctcctgcaaatgaaggcacacattgatcctgaaccacaccacgaa

SEQ ID NO: 258 - protein, 213 aa, Foot-and-mouth disease virus
SGAPPTDLQKMVMANTKPVELPLDGKTVAICCATGVFGTAYLVPRHLFAEKYDKIMIDGRAMTDRDFRVFEFEIKVKGQDMLSDAALMVLHRGNRVRDITKHFRDQARMRKGTPVVGVINNADVGRPIFSGEALTYKDIVVCMDGDTMPGLFAYKAATKAGYCGGAVLAKDGAETFIVGTHSAGGNGVGYCSCVSKSMLLQMKAHIDPEPHHE

SEQ ID NO: 259 - DNA, 639 bp, Foot-and-mouth disease virus
  CDS (1)..(639)
  misc_feature (1)..(639): n is c, g, a, t/u
  misc_feature (1)..(639): I22P/L127_SAT3
agcggatgcccaccgaccgacttgcaaaagatggtcatggcaaacgtaaagcctgttgagctcccnctcgacgggaagaccgttgcgctctgctgcgcgacgggagtgtttgggacagcttacctcgtgccccgtcatcttttcgcagagaagtatgacaagatcatgctggacggccgcgccctgacagacagtgactttagagtgtttgagtttgaggtgaaagtaaaaggacaggacatgctctctgatgccgcactcatggttctccactctggaaaccgtgtgcgcgatctcacgggacacttccgtgacaccatgaaactgtcgaaaggcagccccgtcgttggtgttgtcaacaacgctgatgtcggaagaccnatcttctcaggagacgcactgacctacaaagacctggtcgtttgtatggacggtgataccatgcctggactcttcgcttaccgcgcagggaccaaggttggatactgcggagctgccgttctcgcaaaggacggcgccaagactgtgatcgttggcacccactcagccggaggcaacggagtgggctactgctcctgcgtctcacgatccatgctcctgcagatgaaggcccacattgatccggctcctcacaccgag

SEQ ID NO: 260 - protein, 213 aa, Foot-and-mouth disease virus
SGCPPTDLQKMVMANVKPVELPLDGKTVALCCATGVFGTAYLVPRHLFAEKYDKIMLDGRALTDSDFRVFEFEVKVKGQDMLSDAALMVLHSGNRVRDLTGHFRDTMKLSKGSPVVGVVNNADVGRPIFSGDALTYKDLVVCMDGDTMPGLFAYRAGTKVGYCGAAVLAKDGAKTVIVGTHSAGGNGVGYCSCVSRSMLLQMKAHIDPAPHTE

SEQ ID NO: 261 - DNA, 639 bp, Foot-and-mouth disease virus
  CDS (1)..(639)
  misc_feature (1)..(639): n is c, g, a, t/u
  misc_feature (1)..(639): T100P/L127P_A_2006
agtggtgcccccccgaccgacttgcaaaagatggtcatgggcaacaccaagcctgttgagctcatcctcgacgggaagacggtagccatctgttgcgctaccggagtgtttggcactgcttaccttgtgccacgtcatcttttcgcggagaagtatgacaagatcatgctggacggcagagccatgacagacagtgactacagagtgtttgagtttgagattaaagtaaaagggcaggacatgctctcagatgccgcgctcatggtgctccaccgtgggaatcgcgtgagagacatcccnaaacactttcgtgatacagcaagaatgaagaagggcacccccgttgtcggtgttatcaacaacgctgatgtcgggagaccnattttctctggtgaggcccttacctacaaggacattgtagtgtgcatggatggagacaccatgcctggcctctttgcctacagagccgccaccaaggctggctattgtggaggagctgttcttgcaaaggacggagccgagaccttcatcgtcggcactcactccgcaggtggtaatggagttggatactgttcatgcgtttccaggtccatgctgctaaagatgaaggcacacatcgaccctgagccacaccacgag

SEQ ID NO: 262 - protein, 213 aa, Foot-and-mouth disease virus
SGAPPTDLQKMVMGNTKPVELILDGKTVAICCATGVFGTAYLVPRHLFAEKYDKIMLDGRAMTDSDYRVFEFEIKVKGQDMLSDAALMVLHRGNRVRDIPKHFRDTARMKKGTPVVGVINNADVGRPIFSGEALTYKDIVVCMDGDTMPGLFAYRAATKAGYCGGAVLAKDGAETFIVGTHSAGGNGVGYCSCVSRSMLLKMKAHIDPEPHHE

SEQ ID NO: 263 - DNA, 639 bp, Foot-and-mouth disease virus
  CDS (1)..(639)
  misc_feature (1)..(639): n is c, g, a, t/u
  misc_feature (1)..(639): T100P/L127P_A24
agtggtgccccaccgaccgacttgcaaaagttggtcatgggcaacaccaagcccgttgagctcatccttgacgggaagacggtagccatttgctgtgctactggagttttcggcactgcttacctcgtgcctcgtcatcttttcgcagaaaagtacgacaagatcatgttggacggcagagccatgacagatagtgactacagagtgtttgagtttgagattaaagtaaaaggacaggacatgctctcagacgctgcgctcatggtgctccaccgtgggaatcgcgtgagagacatcccnaaacactttcgtgacacagcaagaatgaagaaaggcacccccgtcgttggtgtgatcaacaacgccgatgtcgggagaccnattttctctggtgaagcccttacctacaaggacattgtagtgtgcatggatggagacaccatgcctgggctctttgcctacaaagccgcaaccaaggctggttattgcggaggagccgtcctcgctaaggacggggctgacacgttcatcgttggcacccactccgctggaggcaatggcgttggatactgctcttgcgtttccaggtccatgcttctcaagatgaaggcacacgttgaccccgaaccacaccacgag

SEQ ID NO: 264 - protein, 213 aa, Foot-and-mouth disease virus
SGAPPTDLQKLVMGNTKPVELILDGKTVAICCATGVFGTAYLVPRHLFAEKYDKIMLDGRAMTDSDYRVFEFEIKVKGQDMLSDAALMVLHRGNRVRDIPKHFRDTARMKKGTPVVGVINNADVGRPIFSGEALTYKDIVVCMDGDTMPGLFAYKAATKAGYCGGAVLAKDGADTFIVGTHSAGGNGVGYCSCVSRSMLLKMKAHVDPEPHHE

SEQ ID NO: 265 - DNA, 639 bp, Foot-and-mouth disease virus
  CDS (1)..(639)
  misc_feature (1)..(639): n is c, g, a, t/u
  misc_feature (1)..(639): T100P/L127P_Asia_leb_89
agtggtgccccaccgaccgacttgcaaaagatggtcatgagcaacactaagcctgttgagctcatccttgacggtaagacggtggccatctgctgcgccaccggagtgtttggtactgcctacctcgtgcctcgtcaccttttcgcagaaaagtacgacaggatcatgttggacggcagggccatgacagacagtgactacagagtgtttgagtttgagattaaagtaaaaggacaggacatgctctcagacgctgcgctcatggtgctccaccgtggcaaccgtgtgagagacatcccnaaacactttcgtgatacagcaagaatgaagaaaggtacccccgttgtcggcgtgatcaacaacgccgacgttgggagaccnattttctccggtgaggccctcacctacaaggacattgtagtgtgcatggatggagacaccatgccgggcctatttgcctacagagccgctaccaaggctggctactgtggaggagccgttcttgccaaggacggagctgacacatttatcgtcggcactcactccgcaggaggcaatggagtcgggtactgctcatgcgtatctaggtccatgctcttgaagatgaaggcacacattgaccccgaaccacaccacgag

SEQ ID NO: 266 - protein, 213 aa, Foot-and-mouth disease virus
SGAPPTDLQKMVMSNTKPVELILDGKTVAICCATGVFGTAYLVPRHLFAEKYDRIMLDGRAMTDSDYRVFEFEIKVKGQDMLSDAALMVLHRGNRVRDIPKHFRDTARMKKGTPVVGVINNADVGRPIFSGEALTYKDIVVCMDGDTMPGLFAYRAATKAGYCGGAVLAKDGADTFIVGTHSAGGNGVGYCSCVSRSMLLKMKAHIDPEPHHE

SEQ ID NO: 267 - DNA, 639 bp, Foot-and-mouth disease virus
  CDS (1)..(639)
  misc_feature (1)..(639): n is c, g, a, t/u
  misc_feature (1)..(639): T100P/L127P_Asia1_Shamir
agtggtgccccaccgaccgacttgcaaaagatggtcatgagcaacactaagcctgttgagctcatccttgacggtaagacggtggccatctgctgcgccaccggagtgtttggtactgcctacctcgtgcctcgtcaccttttcgcagaaaagtacgacaggatcatgttggacggcagggccatgacagacagtgactacagagtgtttgagtttgagattaaagtaaaaggacaggacatgctctcagacgctgcgctcatggtgctccaccgtggcaaccgtgtgagagacatcacgaaacactttcgtgatacagcaagaatgaagaaaggtacccccgttgtcggcgtgatcaacaacgccgacccngggagaccnattttctccggtgaggccctcacctacaaggacattgtagtgtgcatggatggagacaccatgccgggcctatttgcctacagagccgctaccaaggctggctactgtggaggagccgttcttgccaaggacggagctgacacatttatcgtcggcactcactccgcaggaggcaatggagtcgggtactgctcatgcgtatctaggtccatgctcttgaagatgaaggcacacattgaccccgaaccacaccacgag

SEQ ID NO: 268 - protein, 213 aa, Foot-and-mouth disease virus
SGAPPTDLQKMVMSNTKPVELILDGKTVAICCATGVFGTAYLVPRHLFAEKYDRIMLDGRAMTDSDYRVFEFEIKVKGQDMLSDAALMVLHRGNRVRDITKHFRDTARMKKGTPVVGVINNADPGRPIFSGEALTYKDIVVCMDGDTMPGLFAYRAATKAGYCGGAVLAKDGADTFIVGTHSAGGNGVGYCSCVSRSMLLKMKAHIDPEPHHE

SEQ ID NO: 269 - DNA, 639 bp, Foot-and-mouth disease virus
  CDS (1)..(639)
  misc_feature (1)..(639): n is c, g, a, t/u
  misc_feature (1)..(639): T100P/L127P_C3
agcggtgccccaccgaccgacttgcaaaagatggtcatgggcaacaccaagcctgttgagctgattctcgatgggaagacggtggccatctgctgcgccaccggagtgtttggcactgcttacctcgtgccgcgtcatcttttcgcagagaagtatgacaagatcatgttggacggcagagccatgacagacagtgactacagagtgtttgagtttgagattaaagtaaaaggacaggacatgctctcggacgccgcactcatggtgctacaccgtgggaatcgcgtgagagacatcccnaagcactttcgtgacacagcaagaatgaagaaaggcacccccgtcgtaggcgtgattaacaacgccgacgttgggagaccnattttctctggtgaggcccttacctacaaagacattgtggtgtgcatggatggagacaccatgcctggcctctttgcctacagagccgccaccaaggctggttactgtggaggagccgtccttgccaaggatggagctgacacattcatcgtcggcactcactctgctggaggcaatggagttggttactgctcatgcgtttccagatccatgcttctcaagatgaaggcacacattgaccctgagccacaccacgag

SEQ ID NO: 270 - protein, 213 aa, Foot-and-mouth disease virus
SGAPPTDLQKMVMGNTKPVELILDGKTVAICCATGVFGTAYLVPRHLFAEKYDKIMLDGRAMTDSDYRVFEFEIKVKGQDMLSDAALMVLHRGNRVRDIPKHFRDTARMKKGTPVVGVINNADVGRPIFSGEALTYKDIVVCMDGDTMPGLFAYRAATKAGYCGGAVLAKDGADTFIVGTHSAGGNGVGYCSCVSRSMLLKMKAHIDPEPHHE

SEQ ID NO: 271 - DNA, 639 bp, Foot-and-mouth disease virus
  CDS (1)..(639)
  misc_feature (1)..(639): n is c, g, a, t/u
  misc_feature (1)..(639): T100P/L127P_O_pan_asia
agtggtgctccaccgactgacttgcaaaagatggtcatgggtaacaccaagcccgttgagctcatacttgacgggaagacagtagccatctgctgtgctactggagtgtttggcaccgcctacctcgtgcctcgtcatcttttcgcagagaagtatgacaagatcatgttggacggcagagccatgacagacagtgactacagagtgtttgagtttgagattaaagtaaaaggacaggacatgctctcagacgccgcgctcatggtgctccaccgtgggaatcgcgtgcgggacatcacgaaacacttccgtgatgtggcaagaatgaagaaaggaacccccgtcgttggtgttatcaacaacgccgatccngggagaccnattttctctggtgaggccctcacctacaaggacattgtagtgtgcatggatggagacaccatgcctggcctctttgcctacaaggccgccaccaaggccggctactgtggaggagccgttctcgcaaaggacggagccgagactttcatcgtcggcacacactctgcgggcggcaacggagttggatactgctcctgcgtgtccaggtccatgctgctcaagatgaaggcacacatagatcctgaaccacaccatgaa

SEQ ID NO: 272 - protein, 213 aa, Foot-and-mouth disease virus
SGAPPTDLQKMVMGNTKPVELILDGKTVAICCATGVFGTAYLVPRHLFAEKYDKIMLDGRAMTDSDYRVFEFEIKVKGQDMLSDAALMVLHRGNRVRDITKHFRDVARMKKGTPVVGVINNADPGRPIFSGEALTYKDIVVCMDGDTMPGLFAYKAATKAGYCGGAVLAKDGAETFIVGTHSAGGNGVGYCSCVSRSMLLKMKAHIDPEPHHE

SEQ ID NO: 273 - DNA, 639 bp, Foot-and-mouth disease virus
  CDS (1)..(639)
  misc_feature (1)..(639): n is c, g, a, t/u
  misc_feature (1)..(639): T100P/L127P_01_Manissa
agtggtgccccaccgaccgacttgcagaagatggtcatgggcaacactaagcctgttgagctcatcctcgacgggaagacggtagccatctgctgtgctaccggagtgtttggcactgcctacctcgtacctcgtcacctcttcgcggagaagtacgacaagataatgttggacggtagagccatgacagacagtgactacagagtgtttgagtttgagattaaagtaaaaggacaggacatgctctcagacgctgcactcatggtgcttcaccgtgggaaccgcgtgagagacatcacgaaacattttcgtgacacagcaagaatgaagaaaggcacccccgttgtcggtgtgatcaacaacgccgacccngggagaccnattttctctggagaggcccttacctacaaagacattgtagtgtgcatggatggagacaccatgccgggcctgtttgcctacagagccgccaccaaggctggttactgcgggggagccgttctcgccaaggacggagccgacacattcatcgttggcactcactccgcaggtggtaacggagttggatactgctcgtgcgtgtccaggtccatgctcctgaaaatgaaggcacacattgaccctgaaccacaccacgag

SEQ ID NO: 274 - protein, 213 aa, Foot-and-mouth disease virus
SGAPPTDLQKMVMGNTKPVELILDGKTVAICCATGVFGTAYLVPRHLFAEKYDKIMLDGRAMTDSDYRVFEFEIKVKGQDMLSDAALMVLHRGNRVRDITKHFRDTARMKKGTPVVGVINNADPGRPIFSGEALTYKDIVVCMDGDTMPGLFAYRAATKAGYCGGAVLAKDGADTFIVGTHSAGGNGVGYCSCVSRSMLLKMKAHIDPEPHHE

SEQ ID NO: 275 - DNA, 639 bp, Foot-and-mouth disease virus
  CDS (1)..(639)
  misc_feature (1)..(639): n is c, g, a, t/u
  misc_feature (1)..(639): T100P/L127P_SAT1
agcggatgtccaccgaccgacctgcagaggatggtcatggcaaacgtgaaacccgttgagctcatcctcgatgggaagaccgttgcgctctgctgcgctacgggagtgttcgggacggcttatctcgtgcctcgtcatcttttcgcagagaagtacgacaagatcatgctggacggccgtgccctgacagacagtgacttcagagtgtttgagtttgaggtgaaagtaaaaggacaggacatgctctcagatgccgcgctcatggttctccactccggaaaccgtgtgcgcgatctcccnggacacttccgtgacacaatgaaactgtcgaaaggcagtcccgtcgttggtgtggtcaacaacgccgacgtcggaagaccnatcttctcaggagacgcactgacctacaaagacctggtcgtttgtatggacggtgacaccatgcccggactcttcgcataccgcgcggggaccaaggttggttattgtggagcagccgttcttgcaaaagacggcgccaagactgtgatcgtcggcacccactcagccggtggcaacggagtaggctactgctcctgtgtctcacgatccatgctcctgcagatgaaagcccacatcgacccggccccccacaccgag

SEQ ID NO: 276 - protein, 213 aa, Foot-and-mouth disease virus
SGCPPTDLQRMVMANVKPVELILDGKTVALCCATGVFGTAYLVPRHLFAEKYDKIMLDGRALTDSDFRVFEFEVKVKGQDMLSDAALMVLHSGNRVRDLPGHFRDTMKLSKGSPVVGVVNNADVGRPIFSGDALTYKDLVVCMDGDTMPGLFAYRAGTKVGYCGAAVLAKDGAKTVIVGTHSAGGNGVGYCSCVSRSMLLQMKAHIDPAPHTE

SEQ ID NO: 277 - DNA, 639 bp, Foot-and-mouth disease virus
  CDS (1)..(639)
  misc_feature (1)..(639): n is c, g, a, t/u
  misc_feature (1)..(639): T100P/L127P_SAT2_Egypt_2010
agtggagcgccacccaccgacttgcaaaagatggtgatggccaacaccaaaccagtcgagctcatactcgatggtaagacagtggcgatctgctgtgccactggagtgtttgggactgcctatctcgtgcctcgtcatcttttcgctgagaagtatgacaagatcatgattgacggcagggccatgacagaccgtgatttcagagtgtttgagtttgagattaaagtaaaaggacaggacatgctctcggacgccgccctcatggtgctgcaccgtgggaaccgcgtgagagacatcccnaagcactttcgtgatcaagcaagaatgagaaaaggaacccccgtggttggcgtgatcaacaacgccgacgttgggagaccnatcttctctggagaggcactcacctacaaagacattgtagtgtgtatggatggcgacaccatgccaggcctctttgcctataaagccgccaccaaagctggctactgtggaggagccgttcttgcgaaagacggagccgagactttcatcgtcggcactcactccgctggaggaaacggagttggttactgctcttgcgtttccaagtccatgctcctgcaaatgaaggcacacattgatcctgaaccacaccacgaa

SEQ ID NO: 278 - protein, 213 aa, Foot-and-mouth disease virus
SGAPPTDLQKMVMANTKPVELILDGKTVAICCATGVFGTAYLVPRHLFAEKYDKIMIDGRAMTDRDFRVFEFEIKVKGQDMLSDAALMVLHRGNRVRDIPKHFRDQARMRKGTPVVGVINNADVGRPIFSGEALTYKDIVVCMDGDTMPGLFAYKAATKAGYCGGAVLAKDGAETFIVGTHSAGGNGVGYCSCVSKSMLLQMKAHIDPEPHHE

SEQ ID NO: 279 - DNA, 639 bp, Foot-and-mouth disease virus
  CDS (1)..(639)
  misc_feature (1)..(639): n is c, g, a, t/u
  misc_feature (1)..(639): T100P/L127P_SAT3
agcggatgcccaccgaccgacttgcaaaagatggtcatggcaaacgtaaagcctgttgagctcatcctcgacgggaagaccgttgcgctctgctgcgcgacgggagtgtttgggacagcttacctcgtgccccgtcatcttttcgcagagaagtatgacaagatcatgctggacggccgcgccctgacagacagtgactttagagtgtttgagtttgaggtgaaagtaaaaggacaggacatgctctctgatgccgcactcatggttctccactctggaaaccgtgtgcgcgatctcccnggacacttccgtgacaccatgaaactgtcgaaaggcagccccgtcgttggtgttgtcaacaacgctgatgtcggaagaccnatcttctcaggagacgcactgacctacaaagacctggtcgtttgtatggacggtgataccatgcctggactcttcgcttaccgcgcagggaccaaggttggatactgcggagctgccgttctcgcaaaggacggcgccaagactgtgatcgttggcacccactcagccggaggcaacggagtgggctactgctcctgcgtctcacgatccatgctcctgcagatgaaggcccacattgatccggctcctcacaccgag

SEQ ID NO: 280 - protein, 213 aa, Foot-and-mouth disease virus
SGCPPTDLQKMVMANVKPVELILDGKTVALCCATGVFGTAYLVPRHLFAEKYDKIMLDGRALTDSDFRVFEFEVKVKGQDMLSDAALMVLHSGNRVRDLPGHFRDTMKLSKGSPVVGVVNNADVGRPIFSGDALTYKDLVVCMDGDTMPGLFAYRAGTKVGYCGAAVLAKDGAKTVIVGTHSAGGNGVGYCSCVSRSMLLQMKAHIDPAPHTE

SEQ ID NO: 281 - DNA, 639 bp, Foot-and-mouth disease virus
  CDS (1)..(639)
  misc_feature (1)..(639): n is c, g, a, t/u
  misc_feature (1)..(639): T34A/M88L_A_2006
agtggtgcccccccgaccgacttgcaaaagatggtcatgggcaacaccaagcctgttgagctcatcctcgacgggaagacggtagccatctgttgcgctgcnggagtgtttggcactgcttaccttgtgccacgtcatcttttcgcggagaagtatgacaagatcatgctggacggcagagccatgacagacagtgactacagagtgtttgagtttgagattaaagtaaaagggcaggacatgctctcagatgccgcgctcctngtgctccaccgtgggaatcgcgtgagagacatcacgaaacactttcgtgatacagcaagaatgaagaagggcacccccgttgtcggtgttatcaacaacgctgatgtcgggagactgattttctctggtgaggcccttacctacaaggacattgtagtgtgcatggatggagacaccatgcctggcctctttgcctacagagccgccaccaaggctggctattgtggaggagctgttcttgcaaaggacggagccgagaccttcatcgtcggcactcactccgcaggtggtaatggagttggatactgttcatgcgtttccaggtccatgctgctaaagatgaaggcacacatcgaccctgagccacaccacgag

SEQ ID NO: 282 - protein, 213 aa, Foot-and-mouth disease virus
  misc_feature (88)..(88): The 'Xaa' at location 88 stands for Leu.
SGAPPTDLQKMVMGNTKPVELILDGKTVAICCAAGVFGTAYLVPRHLFAEKYDKIMLDGRAMTDSDYRVFEFEIKVKGQDMLSDAALXVLHRGNRVRDITKHFRDTARMKKGTPVVGVINNADVGRLIFSGEALTYKDIVVCMDGDTMPGLFAYRAATKAGYCGGAVLAKDGAETFIVGTHSAGGNGVGYCSCVSRSMLLKMKAHIDPEPHHE

SEQ ID NO: 283 - DNA, 639 bp, Foot-and-mouth disease virus
  CDS (1)..(639)
  misc_feature (1)..(639)
  misc_feature (1)..(639): T34A/M88L_24
agtggtgccccaccgaccgacttgcaaaagttggtcatgggcaacaccaagcccgttgagctcatccttgacgggaagacggtagccatttgctgtgctgcnggagttttcggcactgcttacctcgtgcctcgtcatcttttcgcagaaaagtacgacaagatcatgttggacggcagagccatgacagatagtgactacagagtgtttgagtttgagattaaagtaaaaggacaggacatgctctcagacgctgcgctcctngtgctccaccgtgggaatcgcgtgagagacatcacgaaacactttcgtgacacagcaagaatgaagaaaggcacccccgtcgttggtgtgatcaacaacgccgatgtcgggagactgattttctctggtgaagcccttacctacaaggacattgtagtgtgcatggatggagacaccatgcctgggctctttgcctacaaagccgcaaccaaggctggttattgcggaggagccgtcctcgctaaggacggggctgacacgttcatcgttggcacccactccgctggaggcaatggcgttggatactgctcttgcgtttccaggtccatgcttctcaagatgaaggcacacgttgaccccgaaccacaccacgag

SEQ ID NO: 284 - protein, 213 aa, Foot-and-mouth disease virus
  misc_feature (88)..(88): The 'Xaa' at location 88 stands for Leu.
SGAPPTDLQKLVMGNTKPVELILDGKTVAICCAAGVFGTAYLVPRHLFAEKYDKIMLDGRAMTDSDYRVFEFEIKVKGQDMLSDAALXVLHRGNRVRDITKHFRDTARMKKGTPVVGVINNADVGRLIFSGEALTYKDIVVCMDGDTMPGLFAYKAATKAGYCGGAVLAKDGADTFIVGTHSAGGNGVGYCSCVSRSMLLKMKAHVDPEPHHE

SEQ ID NO: 285 - DNA, 639 bp, Foot-and-mouth disease virus
  CDS (1)..(639)
  misc_feature (1)..(639): n is c, g, a, t/u
  misc_feature (1)..(639): T34A/M88L_Asia_leb_89
agtggtgccccaccgaccgacttgcaaaagatggtcatgagcaacactaagcctgttgagctcatccttgacggtaagacggtggccatctgctgcgccgcnggagtgtttggtactgcctacctcgtgcctcgtcaccttttcgcagaaaagtacgacaggatcatgttggacggcagggccatgacagacagtgactacagagtgtttgagtttgagattaaagtaaaaggacaggacatgctctcagacgctgcgctcctngtgctccaccgtggcaaccgtgtgagagacatcacgaaacactttcgtgatacagcaagaatgaagaaaggtacccccgttgtcggcgtgatcaacaacgccgacgttgggagactgattttctccggtgaggccctcacctacaaggacattgtagtgtgcatggatggagacaccatgccgggcctatttgcctacagagccgctaccaaggctggctactgtggaggagccgttcttgccaaggacggagctgacacatttatcgtcggcactcactccgcaggaggcaatggagtcgggtactgctcatgcgtatctaggtccatgctcttgaagatgaaggcacacattgaccccgaaccacaccacgag

SEQ ID NO: 286 - protein, 213 aa, Foot-and-mouth disease virus
  misc_feature (88)..(88): The 'Xaa' at location 88 stands for Leu.
SGAPPTDLQKMVMSNTKPVELILDGKTVAICCAAGVFGTAYLVPRHLFAEKYDRIMLDGRAMTDSDYRVFEFEIKVKGQDMLSDAALXVLHRGNRVRDITKHFRDTARMKKGTPVVGVINNADVGRLIFSGEALTYKDIVVCMDGDTMPGLFAYRAATKAGYCGGAVLAKDGADTFIVGTHSAGGNGVGYCSCVSRSMLLKMKAHIDPEPHHE

SEQ ID NO: 287 - DNA, 639 bp, Foot-and-mouth disease virus
  CDS (1)..(639)
  misc_feature (1)..(639): n is c, g, a, t/u
  misc_feature (1)..(639): T34A/M88L_Asia1_Shamir
agtggtgccccaccgaccgacttgcaaaagatggtcatgagcaacactaagcctgttgagctcatccttgacggtaagacggtggccatctgctgcgccgcnggagtgtttggtactgcctacctcgtgcctcgtcaccttttcgcagaaaagtacgacaggatcatgttggacggcagggccatgacagacagtgactacagagtgtttgagtttgagattaaagtaaaaggacaggacatgctctcagacgctgcgctcctngtgctccaccgtggcaaccgtgtgagagacatcacgaaacactttcgtgatacagcaagaatgaagaaaggtacccccgttgtcggcgtgatcaacaacgccgacgttgggagattgattttctccggtgaggccctcacctacaaggacattgtagtgtgcatggatggagacaccatgccgggcctatttgcctacagagccgctaccaaggctggctactgtggaggagccgttcttgccaaggacggagctgacacatttatcgtcggcactcactccgcaggaggcaatggagtcgggtactgctcatgcgtatctaggtccatgctcttgaagatgaaggcacacattgaccccgaaccacaccacgag

SEQ ID NO: 288 - protein, 213 aa, Foot-and-mouth disease virus; identical to SEQ ID NO: 286
  misc_feature (88)..(88): The 'Xaa' at location 88 stands for Leu.

SEQ ID NO: 289 - DNA, 639 bp, Foot-and-mouth disease virus
  CDS (1)..(639)
  misc_feature (1)..(639): n is c, g, a, t/u
  misc_feature (1)..(639): T34A/M88L_C3
agcggtgccccaccgaccgacttgcaaaagatggtcatgggcaacaccaagcctgttgagctgattctcgatgggaagacggtggccatctgctgcgccgcnggagtgtttggcactgcttacctcgtgccgcgtcatcttttcgcagagaagtatgacaagatcatgttggacggcagagccatgacagacagtgactacagagtgtttgagtttgagattaaagtaaaaggacaggacatgctctcggacgccgcactcctngtgctacaccgtgggaatcgcgtgagagacatcacgaagcactttcgtgacacagcaagaatgaagaaaggcacccccgtcgtaggcgtgattaacaacgccgacgttgggagactgattttctctggtgaggcccttacctacaaagacattgtggtgtgcatggatggagacaccatgcctggcctctttgcctacagagccgccaccaaggctggttactgtggaggagccgtccttgccaaggatggagctgacacattcatcgtcggcactcactctgctggaggcaatggagttggttactgctcatgcgtttccagatccatgcttctcaagatgaaggcacacattgaccctgagccacaccacgag

SEQ ID NO: 290 - protein, 213 aa, Foot-and-mouth disease virus
  misc_feature (88)..(88): The 'Xaa' at location 88 stands for Leu.
SGAPPTDLQKMVMGNTKPVELILDGKTVAICCAAGVFGTAYLVPRHLFAEKYDKIMLDGRAMTDSDYRVFEFEIKVKGQDMLSDAALXVLHRGNRVRDITKHFRDTARMKKGTPVVGVINNADVGRLIFSGEALTYKDIVVCMDGDTMPGLFAYRAATKAGYCGGAVLAKDGADTFIVGTHSAGGNGVGYCSCVSRSMLLKMKAHIDPEPHHE

SEQ ID NO: 291 - DNA, 639 bp, Foot-and-mouth disease virus
  CDS (1)..(639)
  misc_feature (1)..(639): n is c, g, a, t/u
  misc_feature (1)..(639): T34A/M88L_O_pan_asia
agtggtgctccaccgactgacttgcaaaagatggtcatgggtaacaccaagcccgttgagctcatacttgacgggaagacagtagccatctgctgtgctgcnggagtgtttggcaccgcctacctcgtgcctcgtcatcttttcgcagagaagtatgacaagatcatgttggacggcagagccatgacagacagtgactacagagtgtttgagtttgagattaaagtaaaaggacaggacatgctctcagacgccgcgctcctngtgctccaccgtgggaatcgcgtgcgggacatcacgaaacacttccgtgatgtggcaagaatgaagaaaggaacccccgtcgttggtgttatcaacaacgccgatgtcgggagactgattttctctggtgaggccctcacctacaaggacattgtagtgtgcatggatggagacaccatgcctggcctctttgcctacaaggccgccaccaaggccggctactgtggaggagccgttctcgcaaaggacggagccgagactttcatcgtcggcacacactctgcgggcggcaacggagttggatactgctcctgcgtgtccaggtccatgctgctcaagatgaaggcacacatagatcctgaaccacaccatgaa

SEQ ID NO: 292 - protein, 213 aa, Foot-and-mouth disease virus
  misc_feature (88)..(88): The 'Xaa' at location 88 stands for Leu.
SGAPPTDLQKMVMGNTKPVELILDGKTVAICCAAGVFGTAYLVPRHLFAEKYDKIMLDGRAMTDSDYRVFEFEIKVKGQDMLSDAALXVLHRGNRVRDITKHFRDVARMKKGTPVVGVINNADVGRLIFSGEALTYKDIVVCMDGDTMPGLFAYKAATKAGYCGGAVLAKDGAETFIVGTHSAGGNGVGYCSCVSRSMLLKMKAHIDPEPHHE

SEQ ID NO: 293 - DNA, 639 bp, Foot-and-mouth disease virus
  CDS (1)..(639)
  misc_feature (1)..(639): T34A/M88L_01_Manissa
agtggtgccccaccgaccgacttgcagaagatggtcatgggcaacactaagcctgttgagctcatcctcgacgggaagacggtagccatctgctgtgctgcnggagtgtttggcactgcctacctcgtacctcgtcacctcttcgcggagaagtacgacaagataatgttggacggtagagccatgacagacagtgactacagagtgtttgagtttgagattaaagtaaaaggacaggacatgctctcagacgctgcactcctngtgcttcaccgtgggaaccgcgtgagagacatcacgaaacattttcgtgacacagcaagaatgaagaaaggcacccccgttgtcggtgtgatcaacaacgccgacgttgggagactgattttctctggagaggcccttacctacaaagacattgtagtgtgcatggatggagacaccatgccgggcctgtttgcctacagagccgccaccaaggctggttactgcgggggagccgttctcgccaaggacggagccgacacattcatcgttggcactcactccgcaggtggtaacggagttggatactgctcgtgcgtgtccaggtccatgctcctgaaaatgaaggcacacattgaccctgaaccacaccacgag

SEQ ID NO: 294 - protein, 213 aa, Foot-and-mouth disease virus; identical to SEQ ID NO: 290
  misc_feature (88)..(88): The 'Xaa' at location 88 stands for Leu.

SEQ ID NO: 295 - DNA, 639 bp, Foot-and-mouth disease virus
  CDS (1)..(639)
  misc_feature (1)..(639): n is c, g, a, t/u
  misc_feature (1)..(639): T34A/M88L_SAT1
agcggatgtccaccgaccgacctgcagaggatggtcatggcaaacgtgaaacccgttgagctcatcctcgatgggaagaccgttgcgctctgctgcgctgcnggagtgttcgggacggcttatctcgtgcctcgtcatcttttcgcagagaagtacgacaagatcatgctggacggccgtgccctgacagacagtgacttcagagtgtttgagtttgaggtgaaagtaaaaggacaggacatgctctcagatgccgcgctcctngttctccactccggaaaccgtgtgcgcgatctcacgggacacttccgtgacacaatgaaactgtcgaaaggcagtcccgtcgttggtgtggtcaacaacgccgacgtcggaagactcatcttctcaggagacgcactgacctacaaagacctggtcgtttgtatggacggtgacaccatgcccggactcttcgcataccgcgcggggaccaaggttggttattgtggagcagccgttcttgcaaaagacggcgccaagactgtgatcgtcggcacccactcagccggtggcaacggagtaggctactgctcctgtgtctcacgatccatgctcctgcagatgaaagcccacatcgacccggccccccacaccgag

SEQ ID NO: 296 - protein, 213 aa, Foot-and-mouth disease virus
  misc_feature (88)..(88): The 'Xaa' at location 88 stands for Leu.
SGCPPTDLQRMVMANVKPVELILDGKTVALCCAAGVFGTAYLVPRHLFAEKYDKIMLDGRALTDSDFRVFEFEVKVKGQDMLSDAALXVLHSGNRVRDLTGHFRDTMKLSKGSPVVGVVNNADVGRLIFSGDALTYKDLVVCMDGDTMPGLFAYRAGTKVGYCGAAVLAKDGAKTVIVGTHSAGGNGVGYCSCVSRSMLLQMKAHIDPAPHTE

SEQ ID NO: 297 - DNA, 639 bp, Foot-and-mouth disease virus
  CDS (1)..(639)
  misc_feature (1)..(639): n is c, g, a, t/u
  misc_feature (1)..(639): T34A/M88L_SAT2_Egypt_2010
agtggagcgccacccaccgacttgcaaaagatggtgatggccaacaccaaaccagtcgagctcatactcgatggtaagacagtggcgatctgctgtgccgcnggagtgtttgggactgcctatctcgtgcctcgtcatcttttcgctgagaagtatgacaagatcatgattgacggcagggccatgacagaccgtgatttcagagtgtttgagtttgagattaaagtaaaaggacaggacatgctctcggacgccgccctcctngtgctgcaccgtgggaaccgcgtgagagacatcacgaagcactttcgtgatcaagcaagaatgagaaaaggaacccccgtggttggcgtgatcaacaacgccgacgttgggagactcatcttctctggagaggcactcacctacaaagacattgtagtgtgtatggatggcgacaccatgccaggcctctttgcctataaagccgccaccaaagctggctactgtggaggagccgttcttgcgaaagacggagccgagactttcatcgtcggcactcactccgctggaggaaacggagttggttactgctcttgcgtttccaagtccatgctcctgcaaatgaaggcacacattgatcctgaaccacaccacgaa

SEQ ID NO: 298 - protein, 213 aa, Foot-and-mouth disease virus
  misc_feature (88)..(88): The 'Xaa' at location 88 stands for Leu.
SGAPPTDLQKMVMANTKPVELILDGKTVAICCAAGVFGTAYLVPRHLFAEKYDKIMIDGRAMTDRDFRVFEFEIKVKGQDMLSDAALXVLHRGNRVRDITKHFRDQARMRKGTPVVGVINNADVGRLIFSGEALTYKDIVVCMDGDTMPGLFAYKAATKAGYCGGAVLAKDGAETFIVGTHSAGGNGVGYCSCVSKSMLLQMKAHIDPEPHHE

SEQ ID NO: 299 - DNA, 639 bp, Foot-and-mouth disease virus
  CDS (1)..(639)
  misc_feature (1)..(639): n is c, g, a, t/u
  misc_feature (1)..(639): T34A/M88L_SAT3
agcggatgcccaccgaccgacttgcaaaagatggtcatggcaaacgtaaagcctgttgagctcatcctcgacgggaagaccgttgcgctctgctgcgcggcnggagtgtttgggacagcttacctcgtgccccgtcatcttttcgcagagaagtatgacaagatcatgctggacggccgcgccctgacagacagtgactttagagtgtttgagtttgaggtgaaagtaaaaggacaggacatgctctctgatgccgcactcctngttctccactctggaaaccgtgtgcgcgatctcacgggacacttccgtgacaccatgaaactgtcgaaaggcagccccgtcgttggtgttgtcaacaacgctgatgtcggaagactcatcttctcaggagacgcactgacctacaaagacctggtcgtttgtatggacggtgataccatgcctggactcttcgcttaccgcgcagggaccaaggttggatactgcggagctgccgttctcgcaaaggacggcgccaagactgtgatcgttggcacccactcagccggaggcaacggagtgggctactgctcctgcgtctcacgatccatgctcctgcagatgaaggcccacattgatccggctcctcacaccgag

SEQ ID NO: 300 - protein, 213 aa, Foot-and-mouth disease virus
  misc_feature (88)..(88): The 'Xaa' at location 88 stands for Leu.
SGCPPTDLQKMVMANVKPVELILDGKTVALCCAAGVFGTAYLVPRHLFAEKYDKIMLDGRALTDSDFRVFEFEVKVKGQDMLSDAALXVLHSGNRVRDLTGHFRDTMKLSKGSPVVGVVNNADVGRLIFSGDALTYKDLVVCMDGDTMPGLFAYRAGTKVGYCGAAVLAKDGAKTVIVGTHSAGGNGVGYCSCVSRSMLLQMKAHIDPAPHTE

SEQ ID NO: 301 - DNA, 639 bp, Foot-and-mouth disease virus
  CDS (1)..(639)
  misc_feature (1)..(639): n is c, g, a, t/u
  misc_feature (1)..(639): V124P/L127P_A_2006
agtggtgcccccccgaccgacttgcaaaagatggtcatgggcaacaccaagcctgttgagctcatcctcgacgggaagacggtagccatctgttgcgctaccggagtgtttggcactgcttaccttgtgccacgtcatcttttcgcggagaagtatgacaagatcatgctggacggcagagccatgacagacagtgactacagagtgtttgagtttgagattaaagtaaaagggcaggacatgctctcagatgccgcgctcatggtgctccaccgtgggaatcgcgtgagagacatcacgaaacactttcgtgatacagcaagaatgaagaagggcacccccgttgtcggtgttatcaacaacgctgatccngggagaccnattttctctggtgaggcccttacctacaaggacattgtagtgtgcatggatggagacaccatgcctggcctctttgcctacagagccgccaccaaggctggctattgtggaggagctgttcttgcaaaggacggagccgagaccttcatcgtcggcactcactccgcaggtggtaatggagttggatactgttcatgcgtttccaggtccatgctgctaaagatgaaggcacacatcgaccctgagccacaccacgag

SEQ ID NO: 302 - protein, 213 aa, Foot-and-mouth disease virus
SGAPPTDLQKMVMGNTKPVELILDGKTVAICCATGVFGTAYLVPRHLFAEKYDKIMLDGRAMTDSDYRVFEFEIKVKGQDMLSDAALMVLHRGNRVRDITKHFRDTARMKKGTPVVGVINNADPGRPIFSGEALTYKDIVVCMDGDTMPGLFAYRAATKAGYCGGAVLAKDGAETFIVGTHSAGGNGVGYCSCVSRSMLLKMKAHIDPEPHHE

SEQ ID NO: 303 - DNA, 639 bp, Foot-and-mouth disease virus
  CDS (1)..(639)
  misc_feature (1)..(639): n is c, g, a, t/u
  misc_feature (1)..(639): V124P/L127P_A24
agtggtgccccaccgaccgacttgcaaaagttggtcatgggcaacaccaagcccgttgagctcatccttgacgggaagacggtagccatttgctgtgctactggagttttcggcactgcttacctcgtgcctcgtcatcttttcgcagaaaagtacgacaagatcatgttggacggcagagccatgacagatagtgactacagagtgtttgagtttgagattaaagtaaaaggacaggacatgctctcagacgctgcgctcatggtgctccaccgtgggaatcgcgtgagagacatcacgaaacactttcgtgacacagcaagaatgaagaaaggcacccccgtcgttggtgtgatcaacaacgccgatccngggagaccnattttctctggtgaagcccttacctacaaggacattgtagtgtgcatggatggagacaccatgcctgggctctttgcctacaaagccgcaaccaaggctggttattgcggaggagccgtcctcgctaaggacggggctgacacgttcatcgttggcacccactccgctggaggcaatggcgttggatactgctcttgcgtttccaggtccatgcttctcaagatgaaggcacacgttgaccccgaaccacaccacgag

SEQ ID NO: 304 - protein, 213 aa, Foot-and-mouth disease virus
SGAPPTDLQKLVMGNTKPVELILDGKTVAICCATGVFGTAYLVPRHLFAEKYDKIMLDGRAMTDSDYRVFEFEIKVKGQDMLSDAALMVLHRGNRVRDITKHFRDTARMKKGTPVVGVINNADPGRPIFSGEALTYKDIVVCMDGDTMPGLFAYKAATKAGYCGGAVLAKDGADTFIVGTHSAGGNGVGYCSCVSRSMLLKMKAHVDPEPHHE

SEQ ID NO: 305 - DNA, 639 bp, Foot-and-mouth disease virus; identical to SEQ ID NO: 267
  CDS (1)..(639)
  misc_feature (1)..(639): n is c, g, a, t/u
  misc_feature (1)..(639): V124P/L127P_Asia_leb_89

SEQ ID NO: 306 - protein, 213 aa, Foot-and-mouth disease virus; identical to SEQ ID NO: 268

SEQ ID NO: 307 - DNA, 639 bp, Foot-and-mouth disease virus
  CDS (1)..(639)
  misc_feature (1)..(639): n is c, g, a, t/u
  misc_feature (1)..(639): V124P/L127P_Asia1_Shamir
agtggtgccccaccgaccgacttgcaaaagatggtcatgagcaacactaagcctgttgagctcatccttgacggtaagacggtggccatctgctgcgccaccggagtgtttggtactgcctacctcgtgcctcgtcaccttttcgcagaaaagtacgacaggatcatgttggacggcagggccatgacagacagtgactacagagtgtttgagtttgagattaaagtaaaaggacaggacatgctctcagacgctgcgctcatggtgctccaccgtggcaaccgtgtgagagacatcacgaaacactttcgtgatacagcaagaatgaagaaaggtacccccgttgtcggcgtgatcaacaacgccgacccngggagatcnattttctccggtgaggccctcacctacaaggacattgtagtgtgcatggatggagacaccatgccgggcctatttgcctacagagccgctaccaaggctggctactgtggaggagccgttcttgccaaggacggagctgacacatttatcgtcggcactcactccgcaggaggcaatggagtcgggtactgctcatgcgtatctaggtccatgctcttgaagatgaaggcacacattgaccccgaaccacaccacgag

SEQ ID NO: 308 - protein, 213 aa, Foot-and-mouth disease virus
  misc_feature (127)..(127): The 'Xaa' at location 127 stands for Ser.
SGAPPTDLQKMVMSNTKPVELILDGKTVAICCATGVFGTAYLVPRHLFAEKYDRIMLDGRAMTDSDYRVFEFEIKVKGQDMLSDAALMVLHRGNRVRDITKHFRDTARMKKGTPVVGVINNADPGRXIFSGEALTYKDIVVCMDGDTMPGLFAYRAATKAGYCGGAVLAKDGADTFIVGTHSAGGNGVGYCSCVSRSMLLKMKAHIDPEPHHE

SEQ ID NO: 309 - DNA, 639 bp, Foot-and-mouth disease virus
  CDS (1)..(639)
  misc_feature (1)..(639): n is c, g, a, t/u
  misc_feature (1)..(639): V124P/L127P_C3
agcggtgccccaccgaccgacttgcaaaagatggtcatgggcaacaccaagcctgttgagctgattctcgatgggaagacggtggccatctgctgcgccaccggagtgtttggcactgcttacctcgtgccgcgtcatcttttcgcagagaagtatgacaagatcatgttggacggcagagccatgacagacagtgactacagagtgtttgagtttgagattaaagtaaaaggacaggacatgctctcggacgccgcactcatggtgctacaccgtgggaatcgcgtgagagacatcacgaagcactttcgtgacacagcaagaatgaagaaaggcacccccgtcgtaggcgtgattaacaacgccgacccngggagaccnattttctctggtgaggcccttacctacaaagacattgtggtgtgcatggatggagacaccatgcctggcctctttgcctacagagccgccaccaaggctggttactgtggaggagccgtccttgccaaggatggagctgacacattcatcgtcggcactcactctgctggaggcaatggagttggttactgctcatgcgtttccagatccatgcttctcaagatgaaggcacacattgaccctgagccacaccacgag

SEQ ID NO: 310 - protein, 213 aa, Foot-and-mouth disease virus; identical to SEQ ID NO: 274

SEQ ID NO: 311 - DNA, 639 bp, Foot-and-mouth disease virus; identical to SEQ ID NO: 11
  CDS (1)..(639)
  misc_feature (1)..(639): n is c, g, a, t/u
  misc_feature (1)..(639): V124P/L127P_O_pan_asia

SEQ ID NO: 312 - protein, 213 aa, Foot-and-mouth disease virus; identical to SEQ ID NO: 12

SEQ ID NO: 313 - DNA, 639 bp, Foot-and-mouth disease virus; identical to SEQ ID NO: 13
  CDS (1)..(639)
  misc_feature (1)..(639): n is c, g, a, t/u
  misc_feature (1)..(639): V124P/L127P_01_Manissa

SEQ ID NO: 314 - protein, 213 aa, Foot-and-mouth disease virus; identical to SEQ ID NO: 10

SEQ ID NO: 315 - DNA, 639 bp, Foot-and-mouth disease virus
  CDS (1)..(639)
  misc_feature (1)..(639): n is c, g, a, t/u
  misc_feature (1)..(639): V124P/L127P_SAT1
agcggatgtccaccgaccgacctgcagaggatggtcatggcaaacgtgaaacccgttgagctcatcctcgatgggaagaccgttgcgctctgctgcgctacgggagtgttcgggacggcttatctcgtgcctcgtcatcttttcgcagagaagtacgacaagatcatgctggacggccgtgccctgacagacagtgacttcagagtgtttgagtttgaggtgaaagtaaaaggacaggacatgctctcagatgccgcgctcatggttctccactccggaaaccgtgtgcgcgatctcacgggacacttccgtgacacaatgaaactgtcgaaaggcagtcccgtcgttggtgtggtcaacaacgccgacccnggaagaccnatcttctcaggagacgcactgacctacaaagacctggtcgtttgtatggacggtgacaccatgcccggactcttcgcataccgcgcggggaccaaggttggttattgtggagcagccgttcttgcaaaagacggcgccaagactgtgatcgtcggcacccactcagccggtggcaacggagtaggctactgctcctgtgtctcacgatccatgctcctgcagatgaaagcccacatcgacccggccccccacaccgag

SEQ ID NO: 316 - protein, 213 aa, Foot-and-mouth disease virus
SGCPPTDLQRMVMANVKPVELILDGKTVALCCATGVFGTAYLVPRHLFAEKYDKIMLDGRALTDSDFRVFEFEVKVKGQDMLSDAALMVLHSGNRVRDLTGHFRDTMKLSKGSPVVGVVNNADPGRPIFSGDALTYKDLVVCMDGDTMPGLFAYRAGTKVGYCGAAVLAKDGAKTVIVGTHSAGGNGVGYCSCVSRSMLLQMKAHIDPAPHTE

SEQ ID NO: 317 - DNA, 639 bp, Foot-and-mouth disease virus
  CDS (1)..(639)
  misc_feature (1)..(639): n is c, g, a, t/u
  misc_feature (1)..(639): V124P/L127P_SAT2_Egypt_2010
agtggagcgccacccaccgacttgcaaaagatggtgatggccaacaccaaaccagtcgagctcatactcgatggtaagacagtggcgatctgctgtgccactggagtgtttgggactgcctatctcgtgcctcgtcatcttttcgctgagaagtatgacaagatcatgattgacggcagggccatgacagaccgtgatttcagagtgtttgagtttgagattaaagtaaaaggacaggacatgctctcggacgccgccctcatggtgctgcaccgtgggaaccgcgtgagagacatcacgaagcactttcgtgatcaagcaagaatgagaaaaggaacccccgtggttggcgtgatcaacaacgccgacccngggagaccnatcttctctggagaggcactcacctacaaagacattgtagtgtgtatggatggcgacaccatgccaggcctctttgcctataaagccgccaccaaagctggctactgtggaggagccgttcttgcgaaagacggagccgagactttcatcgtcggcactcactccgctggaggaaacggagttggttactgctcttgcgtttccaagtccatgctcctgcaaatgaaggcacacattgatcctgaaccacaccacgaa

SEQ ID NO: 318 - protein, 213 aa, Foot-and-mouth disease virus
SGAPPTDLQKMVMANTKPVELILDGKTVAICCATGVFGTAYLVPRHLFAEKYDKIMIDGRAMTDRDFRVFEFEIKVKGQDMLSDAALMVLHRGNRVRDITKHFRDQARMRKGTPVVGVINNADPGRPIFSGEALTYKDIVVCMDGDTMPGLFAYKAATKAGYCGGAVLAKDGAETFIVGTHSAGGNGVGYCSCVSKSMLLQMKAHIDPEPHHE

SEQ ID NO: 319 - DNA, 639 bp, Foot-and-mouth disease virus
  CDS (1)..(639)
  misc_feature (1)..(639): n is c, g, a, t/u
  misc_feature (1)..(639): V124P/L127P_SAT3
agcggatgcccaccgaccgacttgcaaaagatggtcatggcaaacgtaaagcctgttgagctcatcctcgacgggaagaccgttgcgctctgctgcgcgacgggagtgtttgggacagcttacctcgtgccccgtcatcttttcgcagagaagtatgacaagatcatgctggacggccgcgccctgacagacagtgactttagagtgtttgagtttgaggtgaaagtaaaaggacaggacatgctctctgatgccgcactcatggttctccactctggaaaccgtgtgcgcgatctcacgggacacttccgtgacaccatgaaactgtcgaaaggcagccccgtcgttggtgttgtcaacaacgctgatccnggaagaccnatcttctcaggagacgcactgacctacaaagacctggtcgtttgtatggacggtgataccatgcctggactcttcgcttaccgcgcagggaccaaggttggatactgcggagctgccgttctcgcaaaggacggcgccaagactgtgatcgttggcacccactcagccggaggcaacggagtgggctactgctcctgcgtctcacgatccatgctcctgcagatgaaggcccacattgatccggctcctcacaccgag

SEQ ID NO: 320 - protein, 213 aa, Foot-and-mouth disease virus
SGCPPTDLQKMVMANVKPVELILDGKTVALCCATGVFGTAYLVPRHLFAEKYDKIMLDGRALTDSDFRVFEFEVKVKGQDMLSDAALMVLHSGNRVRDLTGHFRDTMKLSKGSPVVGVVNNADPGRPIFSGDALTYKDLVVCMDGDTMPGLFAYRAGTKVGYCGAAVLAKDGAKTVIVGTHSAGGNGVGYCSCVSRSMLLQMKAHIDPAPHTE

SEQ ID NO: 321 - DNA, 639 bp, Foot-and-mouth disease virus
  CDS (1)..(639)
  misc_feature (1)..(639): n is c, g, a, t/u
  misc_feature (1)..(639): I22P/T100P/L127P_A_2006
agtggtgcccccccgaccgacttgcaaaagatggtcatgggcaacaccaagcctgttgagctcccnctcgacgggaagacggtagccatctgttgcgctaccggagtgtttggcactgcttaccttgtgccacgtcatcttttcgcggagaagtatgacaagatcatgctggacggcagagccatgacagacagtgactacagagtgtttgagtttgagattaaagtaaaagggcaggacatgctctcagatgccgcgctcatggtgctccaccgtgggaatcgcgtgagagacatcccnaaacactttcgtgatacagcaagaatgaagaagggcacccccgttgtcggtgttatcaacaacgctgatgtcgggagaccnattttctctggtgaggcccttacctacaaggacattgtagtgtgcatggatggagacaccatgcctggcctctttgcctacagagccgccaccaaggctggctattgtggaggagctgttcttgcaaaggacggagccgagaccttcatcgtcggcactcactccgcaggtggtaatggagttggatactgttcatgcgtttccaggtccatgctgctaaagatgaaggcacacatcgaccctgagccacaccacgag

SEQ ID NO: 322 - protein, 213 aa, Foot-and-mouth disease virus
SGAPPTDLQKMVMGNTKPVELPLDGKTVAICCATGVFGTAYLVPRHLFAEKYDKIMLDGRAMTDSDYRVFEFEIKVKGQDMLSDAALMVLHRGNRVRDIPKHFRDTARMKKGTPVVGVINNADVGRPIFSGEALTYKDIVVCMDGDTMPGLFAYRAATKAGYCGGAVLAKDGAETFIVGTHSAGGNGVGYCSCVSRSMLLKMKAHIDPEPHHE

SEQ ID NO: 323 - DNA, 639 bp, Foot-and-mouth disease virus
  CDS (1)..(639)
  misc_feature (1)..(639): n is c, g, a, t/u
  misc_feature (1)..(639): I22P/T100P/L127P_A24
agtggtgccccaccgaccgacttgcaaaagttggtcatgggcaacaccaagcccgttgagctcccncttgacgggaagacggtagccatttgctgtgctactggagttttcggcactgcttacctcgtgcctcgtcatcttttcgcagaaaagtacgacaagatcatgttggacggcagagccatgacagatagtgactacagagtgtttgagtttgagattaaagtaaaaggacaggacatgctctcagacgctgcgctcatggtgctccaccgtgggaatcgcgtgagagacatcccnaaacactttcgtgacacagcaagaatgaagaaaggcacccccgtcgttggtgtgatcaacaacgccgatgtcgggagaccnattttctctggtgaagcccttacctacaaggacattgtagtgtgcatggatggagacaccatgcctgggctctttgcctacaaagccgcaaccaaggctggttattgcggaggagccgtcctcgctaaggacggggctgacacgttcatcgttggcacccactccgctggaggcaatggcgttggatactgctcttgcgtttccaggtccatgcttctcaagatgaaggcacacgttgaccccgaaccacaccacgag

SEQ ID NO: 324 - protein, 213 aa, Foot-and-mouth disease virus
SGAPPTDLQKLVMGNTKPVELPLDGKTVAICCATGVFGTAYLVPRHLFAEKYDKIMLDGRAMTDSDYRVFEFEIKVKGQDMLSDAALMVLHRGNRVRDIPKHFRDTARMKKGTPVVGVINNADVGRPIFSGEALTYKDIVVCMDGDTMPGLFAYKAATKAGYCGGAVLAKDGADTFIVGTHSAGGNGVGYCSCVSRSMLLKMKAHVDPEPHHE

SEQ ID NO: 325 - DNA, 639 bp, Foot-and-mouth disease virus
  CDS (1)..(639)
  misc_feature (1)..(639): n is c, g, a, t/u
  misc_feature (1)..(639): I22P/T100P/L127P_Asia_leb_89
agtggtgccccaccgaccgacttgcaaaagatggtcatgagcaacactaagcctgttgagctcccncttgacggtaagacggtggccatctgctgcgccaccggagtgtttggtactgcctacctcgtgcctcgtcaccttttcgcagaaaagtacgacaggatcatgttggacggcagggccatgacagacagtgactacagagtgtttgagtttgagattaaagtaaaaggacaggacatgctctcagacgctgcgctcatggtgctccaccgtggcaaccgtgtgagagacatcccnaaacactttcgtgatacagcaagaatgaagaaaggtacccccgttgtcggcgtgatcaacaacgccgacgttgggagaccnattttctccggtgaggccctcacctacaaggacattgtagtgtgcatggatggagacaccatgccgggcctatttgcctacagagccgctaccaaggctggctactgtggaggagccgttcttgccaaggacggagctgacacatttatcgtcggcactcactccgcaggaggcaatggagtcgggtactgctcatgcgtatctaggtccatgctcttgaagatgaaggcacacattgaccccgaaccacaccacgag

SEQ ID NO: 326 - protein, 213 aa, Foot-and-mouth disease virus
SGAPPTDLQKMVMSNTKPVELPLDGKTVAICCATGVFGTAYLVPRHLFAEKYDRIMLDGRAMTDSDYRVFEFEIKVKGQDMLSDAALMVLHRGNRVRDIPKHFRDTARMKKGTPVVGVINNADVGRPIFSGEALTYKDIVVCMDGDTMPGLFAYRAATKAGYCGGAVLAKDGADTFIVGTHSAGGNGVGYCSCVSRSMLLKMKAHIDPEPHHE

SEQ ID NO: 327 - DNA, 639 bp, Foot-and-mouth disease virus; identical to SEQ ID NO: 325
  CDS (1)..(639)
  misc_feature (1)..(639): n is c, g, a, t/u
  misc_feature (1)..(639): I22P/T100P/L127P_Asia1_Shamir

SEQ ID NO: 328 - protein, 213 aa, Foot-and-mouth disease virus; identical to SEQ ID NO: 326

SEQ ID NO: 329 - DNA, 639 bp, Foot-and-mouth disease virus
  CDS (1)..(639)
  misc_feature (1)..(639): n is c, g, a, t/u
  misc_feature (1)..(639): I22P/T100P/L127P_C3
agcggtgccccaccgaccgacttgcaaaagatggtcatgggcaacaccaagcctgttgagctgccnctcgatgggaagacggtggccatctgctgcgccaccggagtgtttggcactgcttacctcgtgccgcgtcatcttttcgcagagaagtatgacaagatcatgttggacggcagagccatgacagacagtgactacagagtgtttgagtttgagattaaagtaaaaggacaggacatgctctcggacgccgcactcatggtgctacaccgtgggaatcgcgtgagagacatcccnaagcactttcgtgacacagcaagaatgaagaaaggcacccccgtcgtaggcgtgattaacaacgccgacgttgggagaccnattttctctggtgaggcccttacctacaaagacattgtggtgtgcatggatggagacaccatgcctggcctctttgcctacagagccgccaccaaggctggttactgtggaggagccgtccttgccaaggatggagctgacacattcatcgtcggcactcactctgctggaggcaatggagttggttactgctcatgcgtttccagatccatgcttctcaagatgaaggcacacattgaccctgagccacaccacgag

SEQ ID NO: 330 - protein, 213 aa, Foot-and-mouth disease virus
SGAPPTDLQKMVMGNTKPVELPLDGKTVAICCATGVFGTAYLVPRHLFAEKYDKIMLDGRAMTDSDYRVFEFEIKVKGQDMLSDAALMVLHRGNRVRDIPKHFRDTARMKKGTPVVGVINNADVGRPIFSGEALTYKDIVVCMDGDTMPGLFAYRAATKAGYCGGAVLAKDGADTFIVGTHSAGGNGVGYCSCVSRSMLLKMKAHIDPEPHHE

SEQ ID NO: 331 - DNA, 639 bp, Foot-and-mouth disease virus
  CDS (1)..(639)
  misc_feature (1)..(639): n is c, g, a, t/u
  misc_feature (1)..(639): I22P/T100P/L127P_O_pan_asia
agtggtgctccaccgactgacttgcaaaagatggtcatgggtaacaccaagcccgttgagctcccncttgacgggaagacagtagccatctgctgtgctactggagtgtttggcaccgcctacctcgtgcctcgtcatcttttcgcagagaagtatgacaagatcatgttggacggcagagccatgacagacagtgactacagagtgtttgagtttgagattaaagtaaaaggacaggacatgctctcagacgccgcgctcatggtgctccaccgtgggaatcgcgtgcgggacatcccnaaacacttccgtgatgtggcaagaatgaagaaaggaacccccgtcgttggtgttatcaacaacgccgatgtcgggagaccnattttctctggtgaggccctcacctacaaggacattgtagtgtgcatggatggagacaccatgcctggcctctttgcctacaaggccgccaccaaggccggctactgtggaggagccgttctcgcaaaggacggagccgagactttcatcgtcggcacacactctgcgggcggcaacggagttggatactgctcctgcgtgtccaggtccatgctgctcaagatgaaggcacacatagatcctgaaccacaccatgaa

SEQ ID NO: 332 - protein, 213 aa, Foot-and-mouth disease virus
SGAPPTDLQKMVMGNTKPVELPLDGKTVAICCATGVFGTAYLVPRHLFAEKYDKIMLDGRAMTDSDYRVFEFEIKVKGQDMLSDAALMVLHRGNRVRDIPKHFRDVARMKKGTPVVGVINNADVGRPIFSGEALTYKDIVVCMDGDTMPGLFAYKAATKAGYCGGAVLAKDGAETFIVGTHSAGGNGVGYCSCVSRSMLLKMKAHIDPEPHHE

SEQ ID NO: 333 - DNA, 639 bp, Foot-and-mouth disease virus
  CDS (1)..(639)
  misc_feature (1)..(639): n is c, g, a, t/u
  misc_feature (1)..(639): I22P/T100P/L127P_)1_Manissa
agtggtgccccaccgaccgacttgcagaagatggtcatgggcaacactaagcctgttgagctcccnctcgacgggaagacggtagccatctgctgtgctaccggagtgtttggcactgcctacctcgtacctcgtcacctcttcgcggagaagtacgacaagataatgttggacggtagagccatgacagacagtgactacagagtgtttgagtttgagattaaagtaaaaggacaggacatgctctcagacgctgcactcatggtgcttcaccgtgggaaccgcgtgagagacatcccnaaacattttcgtgacacagcaagaatgaagaaaggcacccccgttgtcggtgtgatcaacaacgccgacgttgggagaccnattttctctggagaggcccttacctacaaagacattgtagtgtgcatggatggagacaccatgccgggcctgtttgcctacagagccgccaccaaggctggttactgcgggggagccgttctcgccaaggacggagccgacacattcatcgttggcactcactccgcaggtggtaacggagttggatactgctcgtgcgtgtccaggtccatgctcctgaaaatgaaggcacacattgaccctgaaccacaccacgag

SEQ ID NO: 334 - protein, 213 aa, Foot-and-mouth disease virus; identical to SEQ ID NO: 330

SEQ ID NO: 335 - DNA, 639 bp, Foot-and-mouth disease virus
  CDS (1)..(639)
  misc_feature (1)..(639): n is c, g, a, t/u
  misc_feature (1)..(639): I22P/T100P/L127P_SAT1
agcggatgtccaccgaccgacctgcagaggatggtcatggcaaacgtgaaacccgttgagctcccnctcgatgggaagaccgttgcgctctgctgcgctacgggagtgttcgggacggcttatctcgtgcctcgtcatcttttcgcagagaagtacgacaagatcatgctggacggccgtgccctgacagacagtgacttcagagtgtttgagtttgaggtgaaagtaaaaggacaggacatgctctcagatgccgcgctcatggttctccactccggaaaccgtgtgcgcgatctcccnggacacttccgtgacacaatgaaactgtcgaaaggcagtcccgtcgttggtgtggtcaacaacgccgacgtcggaagaccnatcttctcaggagacgcactgacctacaaagacctggtcgtttgtatggacggtgacaccatgcccggactcttcgcataccgcgcggggaccaaggttggttattgtggagcagccgttcttgcaaaagacggcgccaagactgtgatcgtcggcacccactcagccggtggcaacggagtaggctactgctcctgtgtctcacgatccatgctcctgcagatgaaagcccacatcgacccggccccccacaccgag

SEQ ID NO: 336 - protein, 213 aa, Foot-and-mouth disease virus
SGCPPTDLQRMVMANVKPVELPLDGKTVALCCATGVFGTAYLVPRHLFAEKYDKIMLDGRALTDSDFRVFEFEVKVKGQDMLSDAALMVLHSGNRVRDLPGHFRDTMKLSKGSPVVGVVNNADVGRPIFSGDALTYKDLVVCMDGDTMPGLFAYRAGTKVGYCGAAVLAKDGAKTVIVGTHSAGGNGVGYCSCVSRSMLLQMKAHIDPAPHTE

SEQ ID NO: 337 - DNA, 639 bp, Foot-and-mouth disease virus
  CDS (1)..(639)
  misc_feature (1)..(639): n is c, g, a, t/u
  misc_feature (1)..(639): I22P/T100P/L127P_SAT2_Egypt_2010
agtggagcgccacccaccgacttgcaaaagatggtgatggccaacaccaaaccagtcgagctcccnctcgatggtaagacagtggcgatctgctgtgccactggagtgtttgggactgcctatctcgtgcctcgtcatcttttcgctgagaagtatgacaagatcatgattgacggcagggccatgacagaccgtgatttcagagtgtttgagtttgagattaaagtaaaaggacaggacatgctctcggacgccgccctcatggtgctgcaccgtgggaaccgcgtgagagacatcccnaagcactttcgtgatcaagcaagaatgagaaaaggaacccccgtggttggcgtgatcaacaacgccgacgttgggagaccnatcttctctggagaggcactcacctacaaagacattgtagtgtgtatggatggcgacaccatgccaggcctctttgcctataaagccgccaccaaagctggctactgtggaggagccgttcttgcgaaagacggagccgagactttcatcgtcggcactcactccgctggaggaaacggagttggttactgctcttgcgtttccaagtccatgctcctgcaaatgaaggcacacattgatcctgaaccacaccacgaa

SEQ ID NO: 338 - protein, 213 aa, Foot-and-mouth disease virus
SGAPPTDLQKMVMANTKPVELPLDGKTVAICCATGVFGTAYLVPRHLFAEKYDKIMIDGRAMTDRDFRVFEFEIKVKGQDMLSDAALMVLHRGNRVRDIPKHFRDQARMRKGTPVVGVINNADVGRPIFSGEALTYKDIVVCMDGDTMPGLFAYKAATKAGYCGGAVLAKDGAETFIVGTHSAGGNGVGYCSCVSKSMLLQMKAHIDPEPHHE

SEQ ID NO: 339 - DNA, 639 bp, Foot-and-mouth disease virus
  CDS (1)..(639)
  misc_feature (1)..(639): n is c, g, a, t/u
  misc_feature (1)..(639): I22P/T100P/L127P_SAT3
agcggatgcccaccgaccgacttgcaaaagatggtcatggcaaacgtaaagcctgttgagctcccnctcgacgggaagaccgttgcgctctgctgcgcgacgggagtgtttgggacagcttacctcgtgccccgtcatcttttcgcagagaagtatgacaagatcatgctggacggccgcgccctgacagacagtgactttagagtgtttgagtttgaggtgaaagtaaaaggacaggacatgctctctgatgccgcactcatggttctccactctggaaaccgtgtgcgcgatctcccnggacacttccgtgacaccatgaaactgtcgaaaggcagccccgtcgttggtgttgtcaacaacgctgatgtcggaagaccnatcttctcaggagacgcactgacctacaaagacctggtcgtttgtatggacggtgataccatgcctggactcttcgcttaccgcgcagggaccaaggttggatactgcggagctgccgttctcgcaaaggacggcgccaagactgtgatcgttggcacccactcagccggaggcaacggagtgggctactgctcctgcgtctcacgatccatgctcctgcagatgaaggcccacattgatccggctcctcacaccgag

SEQ ID NO: 340 - protein, 213 aa, Foot-and-mouth disease virus
SGCPPTDLQKMVMANVKPVELPLDGKTVALCCATGVFGTAYLVPRHLFAEKYDKIMLDGRALTDSDFRVFEFEVKVKGQDMLSDAALMVLHSGNRVRDLPGHFRDTMKLSKGSPVVGVVNNADVGRPIFSGDALTYKDLVVCMDGDTMPGLFAYRAGTKVGYCGAAVLAKDGAKTVIVGTHSAGGNGVGYCSCVSRSMLLQMKAHIDPAPHTE

SEQ ID NO: 341 - DNA, 639 bp, Foot-and-mouth disease virus
  CDS (1)..(639)
  misc_feature (1)..(639): n is c, g, a, t/u
  misc_feature (1)..(639): I22P/T100P/V124P_A_2006
agtggtgcccccccgaccgacttgcaaaagatggtcatgggcaacaccaagcctgttgagctcccnctcgacgggaagacggtagccatctgttgcgctaccggagtgtttggcactgcttaccttgtgccacgtcatcttttcgcggagaagtatgacaagatcatgctggacggcagagccatgacagacagtgactacagagtgtttgagtttgagattaaagtaaaagggcaggacatgctctcagatgccgcgctcatggtgctccaccgtgggaatcgcgtgagagacatcccnaaacactttcgtgatacagcaagaatgaagaagggcacccccgttgtcggtgttatcaacaacgctgatccngggagactgattttctctggtgaggcccttacctacaaggacattgtagtgtgcatggatggagacaccatgcctggcctctttgcctacagagccgccaccaaggctggctattgtggaggagctgttcttgcaaaggacggagccgagaccttcatcgtcggcactcactccgcaggtggtaatggagttggatactgttcatgcgtttccaggtccatgctgctaaagatgaaggcacacatcgaccctgagccacaccacgag

SEQ ID NO: 342 - protein, 213 aa, Foot-and-mouth disease virus
SGAPPTDLQKMVMGNTKPVELPLDGKTVAICCATGVFGTAYLVPRHLFAEKYDKIMLDGRAMTDSDYRVFEFEIKVKGQDMLSDAALMVLHRGNRVRDIPKHFRDTARMKKGTPVVGVINNADPGRLIFSGEALTYKDIVVCMDGDTMPGLFAYRAATKAGYCGGAVLAKDGAETFIVGTHSAGGNGVGYCSCVSRSMLLKMKAHIDPEPHHE

SEQ ID NO: 343 - DNA, 639 bp, Foot-and-mouth disease virus
  CDS (1)..(639)
  misc_feature (1)..(639): n is c, g, a, t/u
  misc_feature (1)..(639): I22P/T100P/V124P_A24
agtggtgccccaccgaccgacttgcaaaagttggtcatgggcaacaccaagcccgttgagctcccncttgacgggaagacggtagccatttgctgtgctactggagttttcggcactgcttacctcgtgcctcgtcatcttttcgcagaaaagtacgacaagatcatgttggacggcagagccatgacagatagtgactacagagtgtttgagtttgagattaaagtaaaaggacaggacatgctctcagacgctgcgctcatggtgctccaccgtgggaatcgcgtgagagacatcccnaaacactttcgtgacacagcaagaatgaagaaaggcacccccgtcgttggtgtgatcaacaacgccgatccngggagactgattttctctggtgaagcccttacctacaaggacattgtagtgtgcatggatggagacaccatgcctgggctctttgcctacaaagccgcaaccaaggctggttattgcggaggagccgtcctcgctaaggacggggctgacacgttcatcgttggcacccactccgctggaggcaatggcgttggatactgctcttgcgtttccaggtccatgcttctcaagatgaaggcacacgttgaccccgaaccacaccacgag

SEQ ID NO: 344 - protein, 213 aa, Foot-and-mouth disease virus
SGAPPTDLQKLVMGNTKPVELPLDGKTVAICCATGVFGTAYLVPRHLFAEKYDKIMLDGRAMTDSDYRVFEFEIKVKGQDMLSDAALMVLHRGNRVRDIPKHFRDTARMKKGTPVVGVINNADPGRLIFSGEALTYKDIVVCMDGDTMPGLFAYKAATKAGYCGGAVLAKDGADTFIVGTHSAGGNGVGYCSCVSRSMLLKMKAHVDPEPHHE

SEQ ID NO: 345 - DNA, 639 bp, Foot-and-mouth disease virus
  CDS (1)..(639)
  misc_feature (1)..(639): n is c, g, a, t/u
  misc_feature (1)..(639): I22P/T100P/V124P_Asia_leb_89
agtggtgccccaccgaccgacttgcaaaagatggtcatgagcaacactaagcctgttgagctcccncttgacggtaagacggtggccatctgctgcgccaccggagtgtttggtactgcctacctcgtgcctcgtcaccttttcgcagaaaagtacgacaggatcatgttggacggcagggccatgacagacagtgactacagagtgtttgagtttgagattaaagtaaaaggacaggacatgctctcagacgctgcgctcatggtgctccaccgtggcaaccgtgtgagagacatcccnaaacactttcgtgatacagcaagaatgaagaaaggtacccccgttgtcggcgtgatcaacaacgccgacccngggagactgattttctccggtgaggccctcacctacaaggacattgtagtgtgcatggatggagacaccatgccgggcctatttgcctacagagccgctaccaaggctggctactgtggaggagccgttcttgccaaggacggagctgacacatttatcgtcggcactcactccgcaggaggcaatggagtcgggtactgctcatgcgtatctaggtccatgctcttgaagatgaaggcacacattgaccccgaaccacaccacgag

SEQ ID NO: 346 - protein, 213 aa, Foot-and-mouth disease virus
SGAPPTDLQKMVMSNTKPVELPLDGKTVAICCATGVFGTAYLVPRHLFAEKYDRIMLDGRAMTDSDYRVFEFEIKVKGQDMLSDAALMVLHRGNRVRDIPKHFRDTARMKKGTPVVGVINNADPGRLIFSGEALTYKDIVVCMDGDTMPGLFAYRAATKAGYCGGAVLAKDGADTFIVGTHSAGGNGVGYCSCVSRSMLLKMKAHIDPEPHHE

SEQ ID NO: 347 - DNA, 639 bp, Foot-and-mouth disease virus
  misc_feature (1)..(639): I22P/T100P/V124P_Asia1_Shamir
  misc_feature (1)..(639): n is c, g, a, t/u
  CDS (1)..(639)
agtggtgccccaccgaccgacttgcaaaagatggtcatgagcaacactaagcctgttgagctcccncttgacggtaagacggtggccatctgctgcgccaccggagtgtttggtactgcctacctcgtgcctcgtcaccttttcgcagaaaagtacgacaggatcatgttggacggcagggccatgacagacagtgactacagagtgtttgagtttgagattaaagtaaaaggacaggacatgctctcagacgctgcgctcatggtgctccaccgtggcaaccgtgtgagagacatcccnaaacactttcgtgatacagcaagaatgaagaaaggtacccccgttgtcggcgtgatcaacaacgccgacccngggagattgattttctccggtgaggccctcacctacaaggacattgtagtgtgcatggatggagacaccatgccgggcctatttgcctacagagccgctaccaaggctggctactgtggaggagccgttcttgccaaggacggagctgacacatttatcgtcggcactcactccgcaggaggcaatggagtcgggtactgctcatgcgtatctaggtccatgctcttgaagatgaaggcacacattgaccccgaaccacaccacgag

SEQ ID NO: 348 - protein, 213 aa, Foot-and-mouth disease virus; identical to SEQ ID NO: 346

SEQ ID NO: 349 - DNA, 639 bp, Foot-and-mouth disease virus
  CDS (1)..(639)
  misc_feature (1)..(639): n is c, g, a, t/u
  misc_feature (1)..(639): I22/T100P/V124P_C3
agcggtgccccaccgaccgacttgcaaaagatggtcatgggcaacaccaagcctgttgagctgccnctcgatgggaagacggtggccatctgctgcgccaccggagtgtttggcactgcttacctcgtgccgcgtcatcttttcgcagagaagtatgacaagatcatgttggacggcagagccatgacagacagtgactacagagtgtttgagtttgagattaaagtaaaaggacaggacatgctctcggacgccgcactcatggtgctacaccgtgggaatcgcgtgagagacatcccnaagcactttcgtgacacagcaagaatgaagaaaggcacccccgtcgtaggcgtgattaacaacgccgacccngggagactgattttctctggtgaggcccttacctacaaagacattgtggtgtgcatggatggagacaccatgcctggcctctttgcctacagagccgccaccaaggctggttactgtggaggagccgtccttgccaaggatggagctgacacattcatcgtcggcactcactctgctggaggcaatggagttggttactgctcatgcgtttccagatccatgcttctcaagatgaaggcacacattgaccctgagccacaccacgag

SEQ ID NO: 350 - protein, 213 aa, Foot-and-mouth disease virus
SGAPPTDLQKMVMGNTKPVELPLDGKTVAICCATGVFGTAYLVPRHLFAEKYDKIMLDGRAMTDSDYRVFEFEIKVKGQDMLSDAALMVLHRGNRVRDIPKHFRDTARMKKGTPVVGVINNADPGRLIFSGEALTYKDIVVCMDGDTMPGLFAYRAATKAGYCGGAVLAKDGADTFIVGTHSAGGNGVGYCSCVSRSMLLKMKAHIDPEPHHE

SEQ ID NO: 351 - DNA, 639 bp, Foot-and-mouth disease virus
  CDS (1)..(639)
  misc_feature (1)..(639): n is c, g, a, t/u
  misc_feature (1)..(639): I22P/T100P?124P_O_pan_asia
agtggtgctccaccgactgacttgcaaaagatggtcatgggtaacaccaagcccgttgagctcccncttgacgggaagacagtagccatctgctgtgctactggagtgtttggcaccgcctacctcgtgcctcgtcatcttttcgcagagaagtatgacaagatcatgttggacggcagagccatgacagacagtgactacagagtgtttgagtttgagattaaagtaaaaggacaggacatgctctcagacgccgcgctcatggtgctccaccgtgggaatcgcgtgcgggacatcccnaaacacttccgtgatgtggcaagaatgaagaaaggaacccccgtcgttggtgttatcaacaacgccgatccngggagactgattttctctggtgaggccctcacctacaaggacattgtagtgtgcatggatggagacaccatgcctggcctctttgcctacaaggccgccaccaaggccggctactgtggaggagccgttctcgcaaaggacggagccgagactttcatcgtcggcacacactctgcgggcggcaacggagttggatactgctcctgcgtgtccaggtccatgctgctcaagatgaaggcacacatagatcctgaaccacaccatgaa

SEQ ID NO: 352 - protein, 213 aa, Foot-and-mouth disease virus
SGAPPTDLQKMVMGNTKPVELPLDGKTVAICCATGVFGTAYLVPRHLFAEKYDKIMLDGRAMTDSDYRVFEFEIKVKGQDMLSDAALMVLHRGNRVRDIPKHFRDVARMKKGTPVVGVINNADPGRLIFSGEALTYKDIVVCMDGDTMPGLFAYKAATKAGYCGGAVLAKDGAETFIVGTHSAGGNGVGYCSCVSRSMLLKMKAHIDPEPHHE

SEQ ID NO: 353 - DNA, 639 bp, Foot-and-mouth disease virus
  CDS (1)..(639)
  misc_feature (1)..(639): n is c, g, a, t/u
  misc_feature (1)..(639): I22P/T100P/V124P_01_Manissaa
agtggtgccccaccgaccgacttgcagaagatggtcatgggcaacactaagcctgttgagctcccnctcgacgggaagacggtagccatctgctgtgctaccggagtgtttggcactgcctacctcgtacctcgtcacctcttcgcggagaagtacgacaagataatgttggacggtagagccatgacagacagtgactacagagtgtttgagtttgagattaaagtaaaaggacaggacatgctctcagacgctgcactcatggtgcttcaccgtgggaaccgcgtgagagacatcccnaaacattttcgtgacacagcaagaatgaagaaaggcacccccgttgtcggtgtgatcaacaacgccgacccngggagactgattttctctggagaggcccttacctacaaagacattgtagtgtgcatggatggagacaccatgccgggcctgtttgcctacagagccgccaccaaggctggttactgcgggggagccgttctcgccaaggacggagccgacacattcatcgttggcactcactccgcaggtggtaacggagttggatactgctcgtgcgtgtccaggtccatgctcctgaaaatgaaggcacacattgaccctgaaccacaccacgag

SEQ ID NO: 354 - protein, 213 aa, Foot-and-mouth disease virus; identical to SEQ ID NO: 350

SEQ ID NO: 355 - DNA, 639 bp, Foot-and-mouth disease virus
  CDS (1)..(639)
  misc_feature (1)..(639): n is c, g, a, t/u
  misc_feature (1)..(639): I22P/T100P/V124P_SAT1
agcggatgtccaccgaccgacctgcagaggatggtcatggcaaacgtgaaacccgttgagctcccnctcgatgggaagaccgttgcgctctgctgcgctacgggagtgttcgggacggcttatctcgtgcctcgtcatcttttcgcagagaagtacgacaagatcatgctggacggccgtgccctgacagacagtgacttcagagtgtttgagtttgaggtgaaagtaaaaggacaggacatgctctcagatgccgcgctcatggttctccactccggaaaccgtgtgcgcgatctcccnggacacttccgtgacacaatgaaactgtcgaaaggcagtcccgtcgttggtgtggtcaacaacgccgacccnggaagactcatcttctcaggagacgcactgacctacaaagacctggtcgtttgtatggacggtgacaccatgcccggactcttcgcataccgcgcggggaccaaggttggttattgtggagcagccgttcttgcaaaagacggcgccaagactgtgatcgtcggcacccactcagccggtggcaacggagtaggctactgctcctgtgtctcacgatccatgctcctgcagatgaaagcccacatcgacccggccccccacaccgag

SEQ ID NO: 356 - protein, 213 aa, Foot-and-mouth disease virus
SGCPPTDLQRMVMANVKPVELPLDGKTVALCCATGVFGTAYLVPRHLFAEKYDKIMLDGRALTDSDFRVFEFEVKVKGQDMLSDAALMVLHSGNRVRDLPGHFRDTMKLSKGSPVVGVVNNADPGRLIFSGDALTYKDLVVCMDGDTMPGLFAYRAGTKVGYCGAAVLAKDGAKTVIVGTHSAGGNGVGYCSCVSRSMLLQMKAHIDPAPHTE

SEQ ID NO: 357 - DNA, 639 bp, Foot-and-mouth disease virus
  CDS (1)..(639)
  misc_feature (1)..(639): n is c, g, a, t/u
  misc_feature (1)..(639): I22P/T100P/V124P_SAT_Egypt_2010
agtggagcgccacccaccgacttgcaaaagatggtgatggccaacaccaaaccagtcgagctcccnctcgatggtaagacagtggcgatctgctgtgccactggagtgtttgggactgcctatctcgtgcctcgtcatcttttcgctgagaagtatgacaagatcatgattgacggcagggccatgacagaccgtgatttcagagtgtttgagtttgagattaaagtaaaaggacaggacatgctctcggacgccgccctcatggtgctgcaccgtgggaaccgcgtgagagacatcccnaagcactttcgtgatcaagcaagaatgagaaaaggaacccccgtggttggcgtgatcaacaacgccgacccngggagactcatcttctctggagaggcactcacctacaaagacattgtagtgtgtatggatggcgacaccatgccaggcctctttgcctataaagccgccaccaaagctggctactgtggaggagccgttcttgcgaaagacggagccgagactttcatcgtcggcactcactccgctggaggaaacggagttggttactgctcttgcgtttccaagtccatgctcctgcaaatgaaggcacacattgatcctgaaccacaccacgaa

SEQ ID NO: 358 - protein, 213 aa, Foot-and-mouth disease virus
SGAPPTDLQKMVMANTKPVELPLDGKTVAICCATGVFGTAYLVPRHLFAEKYDKIMIDGRAMTDRDFRVFEFEIKVKGQDMLSDAALMVLHRGNRVRDIPKHFRDQARMRKGTPVVGVINNADPGRLIFSGEALTYKDIVVCMDGDTMPGLFAYKAATKAGYCGGAVLAKDGAETFIVGTHSAGGNGVGYCSCVSKSMLLQMKAHIDPEPHHE

SEQ ID NO: 359 - DNA, 639 bp, Foot-and-mouth disease virus
  CDS (1)..(639)
  misc_feature (1)..(639): n is c, g, a, t/u
  misc_feature (1)..(639): I22P/T100P/V124P_SAT3
agcggatgcccaccgaccgacttgcaaaagatggtcatggcaaacgtaaagcctgttgagctcccnctcgacgggaagaccgttgcgctctgctgcgcgacgggagtgtttgggacagcttacctcgtgccccgtcatcttttcgcagagaagtatgacaagatcatgctggacggccgcgccctgacagacagtgactttagagtgtttgagtttgaggtgaaagtaaaaggacaggacatgctctctgatgccgcactcatggttctccactctggaaaccgtgtgcgcgatctcccnggacacttccgtgacaccatgaaactgtcgaaaggcagccccgtcgttggtgttgtcaacaacgctgatccnggaagactcatcttctcaggagacgcactgacctacaaagacctggtcgtttgtatggacggtgataccatgcctggactcttcgcttaccgcgcagggaccaaggttggatactgcggagctgccgttctcgcaaaggacggcgccaagactgtgatcgttggcacccactcagccggaggcaacggagtgggctactgctcctgcgtctcacgatccatgctcctgcagatgaaggcccacattgatccggctcctcacaccgag

SEQ ID NO: 360 - protein, 213 aa, Foot-and-mouth disease virus
SGCPPTDLQKMVMANVKPVELPLDGKTVALCCATGVFGTAYLVPRHLFAEKYDKIMLDGRALTDSDFRVFEFEVKVKGQDMLSDAALMVLHSGNRVRDLPGHFRDTMKLSKGSPVVGVVNNADPGRLIFSGDALTYKDLVVCMDGDTMPGLFAYRAGTKVGYCGAAVLAKDGAKTVIVGTHSAGGNGVGYCSCVSRSMLLQMKAHIDPAPHTE

SEQ ID NO: 361 - DNA, 2262 bp, Artificial Sequence
  P1_A2006_cut_sites_removed
ggagccgggcaatccagtccggcaaccgggtcacaaaaccaatcaggcaacactggtagtatcatcaacaactactacatgcagcagtaccagaactccatggatacacaacttggcgacaacgccattagcggtggttccaacgagggctccactgacactacctccacacacacaaccaacacacagaacaatgactggttttcaaagctggccagttctgccttcagcggtctcttcggcgctcttctcgctgacaaaaagacagaggagactaccctcctggaagaccgcatccttaccacccgcaacggacacaccacctcgacaacccagtcgagtgtgggtgtcacctacgggtactccactggtgaagaccacgtctctggacctaacacatctggcctggagacgcgagtggtacaggcagagagattcttcaagaaacacttgtttgattggacaactgataaggcttttggacacctggaaaaactggaactccccaccgaacacaagggtgtctatgggcacttggtggactctttcgcatacatgagaaatggctgggacgtggaggtgacagccgttggcaatcagttcaacggtgggtgtctcctggtggccatggttcctgagtggaaagagtttacccctcgtgagaaataccagctcaccctgtttccacaccaatttatcaaccccagaaccaacatgacagcccacatcacggtcccgtaccttggtgtcaataggtatgaccagtacaaacagcacaaaccctggacactggtcgtgatggtggtttcgccactgaccaccagcagcattggggcctcacagattaaggtctatgccaacattgccccaaccttcgttcacgtggccggcgagctcccatcgaaagaagggatcgtgccggttgcttgtacagacgggtacggtggcctggtgacaacagacccgaaaacagctgaccctgtttatggtatggtgtacaacccgcccagaaccaactaccctgggcgctttacaaacttgttggacgtggccgaggcttgcccgaccttcctctgttttgacgacgggaaaccttacgttgtgacaaggacggacgaccaacgcctcctggccaagtttgacgtttctcttgctgcaaagcacatgtcaaacacctacctctcagggatagcacagtactacacgcagtactctggcactatcaatctgcatttcatgttcactggctctactgaatcaaaggcccggtacatggtggcgtacattccacctggcatggacaacccaccggacacacctgagaaggctgcacactgcatccacgccgagtgggacaccgggctgaactccaaatttactttttctatcccttacgtgtctgctgcagactacgcatacactgcgtctgacgtggcagaaacaacaaacgtacaggggtgggtctgcatataccaaatcactcacgggaaggctgaacaggacactctggtcgtgtcggtcagcgccggcaaggactttgaactgcgcctcccaattgacccccgcacgcaaaccaccactgccggggagtcagcagaccctgtcaccaccaccgttgagaactacggtggtgagacacaggctcagcgacgtcagcacactgacgtcggcttcatcatggacaggtttgcgaaaatcagccccgtgagccccacgcacgtcattgacctcatgcaaacacaccaacatgcgttggtgggtgcccttttgcgtgcagccacgtactacttctccgatctggagattgtggtgcgtcatgatggcaacttgacgtgggtgcccaatggagcacctgtagaagccttggccaacacaagcaaccccaccgcctaccacaagcagccatttacgagacttgcgctcccttacaccgcgccgcaccgagtgttggcaacagtgtataacggagtaagcaagtactctacaactggtaatggcagaaggggtgatctggggcctcttgcggcgcgggtcgccgcacagctccccagctctttcaattttggtgcaattcgggccacgaccgtccacgagcttctcgtgcgcatgaaacgtgccgagctctactgtccaaggcctctgctggcagtggaagtgttgtcgcaggacagacacaagcaaaagatcattgcacctgcaaagcaactcctgaacttcgacctgctcaagttggcgggagacgttgagtccaaccccgggccc

SEQ ID NO: 362 - DNA, 2262 bp, Foot-and-mouth disease virus
  CDS (1)..(2262)
  misc_feature (1)..(2262): P1_A2006_wildtype
ggagccgggcaatccagtccggcaaccgggtcacaaaaccaatcaggcaacactggtagtatcatcaacaactactacatgcagcagtaccagaactccatggatacacaacttggcgacaacgccattagcggtggttccaacgagggctccactgacactacctccacacacacaaccaacacacagaacaatgactggttttcaaagctggccagttctgccttcagcggtctcttcggcgctcttctcgctgacaaaaagacagaggagactaccctcctggaggaccgcatccttaccacccgcaacggacacaccacctcgacaacccagtcgagtgtgggtgtcacctacgggtactccactggtgaagaccacgtctctggacctaacacatctggcctggagacgcgagtggtacaggcagagagattcttcaagaaacacttgtttgattggacaactgataaagcttttggacacctggaaaaactggaactccccaccgaacacaagggtgtctacgggcacttggtggactctttcgcatacatgagaaatggctgggacgtggaggtgaccgccgttggcaaccagttcaacggtgggtgtctcctggtggccatggtacctgagtggaaagagtttacccctcgtgagaaataccagctcaccctgtttccacaccaatttatcaaccccagaaccaacatgacagcccacatcacggtcccgtaccttggtgtcaataggtatgaccagtacaaacagcacaaaccctggacactggtcgtgatggtggtttcgccactgaccaccagcagcattggggcctcacagattaaggtctacgccaacattgccccaaccttcgttcacgtggccggcgagctcccatcgaaagaagggatcgtgccggttgcttgtacagacgggtacggtggcctggtgacaacagacccgaaaacagctgaccctgtttatggtatggtgtacaacccgcccagaaccaactaccctgggcgctttacaaacttgttggacgtggccgaggcttgcccgaccttcctctgttttgacgacgggaaaccgtacgttgtgacaaggacggacgaccaacgcctcctggccaagtttgacgtttctcttgctgcaaagcacatgtcaaacacctacctctcagggatagcacagtactacacgcagtactctggcactatcaatctgcatttcatgttcactggctctactgaatcaaaggcccggtacatggtggcgtacattccacctggcatggacaacccaccggacacacctgagaaggctgcacactgcatccacgccgagtgggacaccgggctgaactccaaatttactttttctatcccgtacgtgtctgctgcagactacgcatacactgcgtctgacgtggcagaaacaacaaacgtacaggggtgggtctgcatataccaaatcactcacgggaaggctgaacaggacactctggtcgtgtcggtcagcgccggcaaggactttgaactgcgcctcccaattgacccccgcacgcaaaccaccactgccggggagtcagcagaccctgtcaccaccaccgttgagaactacggtggtgagacacaggctcagcgacgtcagcacactgacgtcggcttcatcatggacaggtttgcgaaaatcagccccgtgagccccacgcacgtcattgacctcatgcaaacacaccaacacgcgttggtgggtgcccttttgcgtgcagccacgtactacttctccgatctggagattgtggtgcgtcatgatggcaacttgacgtgggtgcccaatggagcacctgtagaagccttggccaacacaagcaaccccaccgcctaccacaagcagccatttacgagacttgcgctcccttacaccgcgccgcaccgagtgttggcaacagtgtataacggagtaagcaagtactctacaactggtaatggcagaaggggtgacctggggcctcttgcggcgcgggtcgccgcacagctccccagctctttcaattttggtgcaattcgggccacgaccgtccacgagcttctcgtgcgcatgaaacgtgccgagctctactgtcccaggcctctgctggcagtggaagtgttgtcgcaggacagacacaagcaaaagatcattgcacctgcaaagcaactcctgaacttcgacctgctcaagttggcgggagacgttgagtccaaccctgggccc

SEQ ID NO: 363 - protein, 754 aa, Foot-and-mouth disease virus
GAGQSSPATGSQNQSGNTGSIINNYYMQQYQNSMDTQLGDNAISGGSNEGSTDTTSTHTTNTQNNDWFSKLASSAFSGLFGALLADKKTEETTLLEDRILTTRNGHTTSTTQSSVGVTYGYSTGEDHVSGPNTSGLETRVVQAERFFKKHLFDWTTDKAFGHLEKLELPTEHKGVYGHLVDSFAYMRNGWDVEVTAVGNQFNGGCLLVAMVPEWKEFTPREKYQLTLFPHQFINPRTNMTAHITVPYLGVNRYDQYKQHKPWTLVVMVVSPLTTSSIGASQIKVYANIAPTFVHVAGELPSKEGIVPVACTDGYGGLVTTDPKTADPVYGMVYNPPRTNYPGRFTNLLDVAEACPTFLCFDDGKPYVVTRTDDQRLLAKFDVSLAAKHMSNTYLSGIAQYYTQYSGTINLHFMFTGSTESKARYMVAYIPPGMDNPPDTPEKAAHCIHAEWDTGLNSKFTFSIPYVSAADYAYTASDVAETTNVQGWVCIYQITHGKAEQDTLVVSVSAGKDFELRLPIDPRTQTTTAGESADPVTTTVENYGGETQAQRRQHTDVGFIMDRFAKISPVSPTHVIDLMQTHQHALVGALLRAATYYFSDLEIVVRHDGNLTWVPNGAPVEALANTSNPTAYHKQPFTRLALPYTAPHRVLATVYNGVSKYSTTGNGRRGDLGPLAARVAAQLPSSFNFGAIRATTVHELLVRMKRAELYCPRPLLAVEVLSQDRHKQKIIAPAKQLLNFDLLKLAGDVESNPGP

SEQ ID NO: 364 - DNA, 2262 bp, Artificial Sequence
  P1_A24_Cruzeiro_cut_sites_removed
ggggccgggcaatccagtccggcgaccggctcgcagaaccaatctggcaacactggcagcataattaacaactactacatgcagcaataccagaactccatggacacacagttgggagacaatgccatcagtggaggctccaacgagggctccacggacacaacttcaacacacacaaccaacactcaaaacaatgactggttctcgaagctcgccagttcagcttttacaggtctgttcggtgcactgctcgccgacaagaagacagaggaaacgacacttcttgaggaccgcatcctcaccacccgcaacgggcacaccacctcgacgacccaatcgagtgtgggtgtcacacacgggtactccacagaggaggaccacgttgctgggccaaacacatcgggcctggagacgcgagtggtgcaggcagagagattctacaaaaagtacttgtttgactggacaacggacaaggcatttggacacctggaaaagctggagctcccgtccgaccaccacggtgtctttggacacttggtggactcgtacgcctatatgagaaatggctgggatgttgaggtgtccgctgttggcaaccagttcaacggcgggtgcctcctggtggccatggttcctgaatggaaggaatttgacacacgggagaaataccaactcacccttttcccgcaccagtttattagccccagaactaacatgactgcccacatcacggtcccctaccttggtgtgaacaggtatgatcagtacaagaagcataagccctggacattggttgtcatggtcgtgtcgccacttacggtcaacaacaccagtgcggcacaaatcaaggtctatgccaacatagctccgacctatgttcacgtggccggtgaactcccctcgaaagaggggattttcccggttgcatgtgcggacggttacggaggattggtgacgacagacccgaagacagctgaccctgcttatggcaaggtgtacaacccgcctaggactaactaccctgggcgcttcaccaacctgttggacgtggccgaagcgtgtcccactttcctctgctttgacgacgggaaaccgtacgtcaccacgcggacggatgacacccgacttttggccaagtttgacctttcccttgccgcaaaacacatgtccaacacatacctgtcagggattgctcagtactacacacagtactctggcaccatcaatttgcatttcatgttcacaggttccactgattcaaaggcccgatacatggtggcctacatcccacctggggtggagacaccaccggacacacctgaaagggctgcccactgcattcacgctgaatgggacactggactaaactccaaattcactttctcaatcccgtacgtatccgccgccgattatgcgtacacagcgtctgacacggcagaaacaatcaacgtacagggatgggtctgcatctaccaaattacacacgggaaggctgaaaatgacaccttggtcgtgtcggttagcgccggcaaagactttgagttgcgcctcccgattgacccccgccagcagaccaccgctaccggggaatcagcagacccggtcacaaccaccgtggagaactacggcggtgagacacaaatccagagacgtcaccacacggacattggtttcatcatggacagatttgtgaagatccagagcttgagcccaacacatgtcattgacctcatgcagactcaccaacacggtctggtgggtgccttgctgcgtgcagccacgtactacttttctgacctggaaattgttgtacggcacgaaggcaatctgacctgggtgcccaacggcgcccctgaatcagccctgttgaacaccagcaaccccactgcctacaacaaggcaccattcacgagactcgctctcccctacactgcgccgcaccgtgtgctggcaacagtgtacaacgggacgagtaagtatgctgtgggtggttcaggcagaagaggcgacatggggtctctcgcggcgcgagtcgtgaaacagcttcctgcttcatttaactacggtgcaatcaaggccgacgccatccacgaacttctcgtgcgcatgaaacgggccgagctctactgccccagaccgctgttggcaatagaggtgtcttcgcaagacaggcacaagcaaaagatcattgcaccagcaaagcagcttctgaattttgacctgctcaagttggccggagacgttgagtccaaccctgggccc

SEQ ID NO: 365 - DNA, 2262 bp, Foot-and-mouth disease virus
  CDS (1)..(2262)
  misc_feature (1)..(2262): P1_A24_Cruzeiro_wild_type
ggggccgggcaatccagtccggcgaccggctcgcagaaccaatctggcaacactggcagcataattaacaactactacatgcagcaataccagaactccatggacacacagttgggagacaatgccatcagtggaggctccaacgagggctccacggacacaacttcaacacacacaaccaacactcaaaacaatgactggttctcgaagctcgccagttcagcttttaccggtctgttcggtgcactgctcgccgacaagaagacagaggaaacgacacttcttgaggaccgcatcctcaccacccgcaacgggcacaccacctcgacgacccaatcgagtgtgggtgtcacacacgggtactccacagaggaggaccacgttgctgggcccaacacatcgggcctggagacgcgagtggtgcaggcagagagattctacaaaaagtacttgtttgactggacaacggacaaggcatttggacacctggaaaagctggagctcccgtccgaccaccacggtgtctttggacacttggtggactcgtacgcctatatgagaaatggctgggatgttgaggtgtccgctgttggcaaccagttcaacggcgggtgcctcctggtggccatggtacctgaatggaaggaatttgacacacgggagaaataccaactcacccttttcccgcaccagtttattagccccagaactaacatgactgcccacatcacggtcccctaccttggtgtgaacaggtatgatcagtacaagaagcataagccctggacattggttgtcatggtcgtgtcgccacttacggtcaacaacactagtgcggcacaaatcaaggtctacgccaacatagctccgacctatgttcacgtggccggtgaactcccctcgaaagaggggattttcccggttgcatgtgcggacggttacggaggattggtgacgacagacccgaagacagctgaccctgcttatggcaaggtgtacaacccgcctaggactaactaccctgggcgcttcaccaacctgttggacgtggccgaagcgtgtcccactttcctctgctttgacgacgggaaaccgtacgtcaccacgcggacggatgacacccgacttttggccaagtttgacctttcccttgccgcaaaacatatgtccaacacatacctgtcagggattgctcagtactacacacagtactctggcaccatcaatttgcatttcatgttcacaggttccactgattcaaaggcccgatacatggtggcctacatcccacctggggtggagacaccaccggacacacctgaaagggctgcccactgcattcacgctgaatgggacactggactaaactccaaattcactttctcaatcccgtacgtatccgccgcggattacgcgtacacagcgtctgacacggcagaaacaatcaacgtacagggatgggtctgcatctaccaaattacacacgggaaggctgaaaatgacaccttggtcgtgtcggttagcgccggcaaagactttgagttgcgcctcccgattgacccccgccagcagaccaccgctaccggggaatcagcagacccggtcaccaccaccgtggagaactacggcggtgagacacaaatccagagacgtcaccacacggacattggtttcatcatggacagatttgtgaagatccaaagcttgagcccaacacatgtcattgacctcatgcagactcaccaacacggtctggtgggtgccttgctgcgtgcagccacgtactacttttctgacctggaaattgttgtacggcacgaaggcaatctgacctgggtgcccaacggcgcccctgaatcagccctgttgaacaccagcaaccccactgcctacaacaaggcaccattcacgagactcgctctcccctacactgcgccgcaccgtgtgctggcaacagtgtacaacgggacgagtaagtatgctgtgggtggttcaggcagaagaggcgacatggggtctctcgcggcgcgagtcgtgaaacagcttcctgcttcatttaactacggtgcaatcaaggccgacgccatccacgaacttctcgtgcgcatgaaacgggccgagctctactgccccagaccgctgttggcaatagaggtgtcttcgcaagacaggcacaagcaaaagatcattgcaccagcaaagcagcttctgaattttgacctgctcaagttggccggagacgttgagtccaaccctgggccc

SEQ ID NO: 366 - protein, 754 aa, Foot-and-mouth disease virus
GAGQSSPATGSQNQSGNTGSIINNYYMQQYQNSMDTQLGDNAISGGSNEGSTDTTSTHTTNTQNNDWFSKLASSAFTGLFGALLADKKTEETTLLEDRILTTRNGHTTSTTQSSVGVTHGYSTEEDHVAGPNTSGLETRVVQAERFYKKYLFDWTTDKAFGHLEKLELPSDHHGVFGHLVDSYAYMRNGWDVEVSAVGNQFNGGCLLVAMVPEWKEFDTREKYQLTLFPHQFISPRTNMTAHITVPYLGVNRYDQYKKHKPWTLVVMVVSPLTVNNTSAAQIKVYANIAPTYVHVAGELPSKEGIFPVACADGYGGLVTTDPKTADPAYGKVYNPPRTNYPGRFTNLLDVAEACPTFLCFDDGKPYVTTRTDDTRLLAKFDLSLAAKHMSNTYLSGIAQYYTQYSGTINLHFMFTGSTDSKARYMVAYIPPGVETPPDTPERAAHCIHAEWDTGLNSKFTFSIPYVSAADYAYTASDTAETINVQGWVCIYQITHGKAENDTLVVSVSAGKDFELRLPIDPRQQTTATGESADPVTTTVENYGGETQIQRRHHTDIGFIMDRFVKIQSLSPTHVIDLMQTHQHGLVGALLRAATYYFSDLEIVVRHEGNLTWVPNGAPESALLNTSNPTAYNKAPFTRLALPYTAPHRVLATVYNGTSKYAVGGSGRRGDMGSLAARVVKQLPASFNYGAIKADAIHELLVRMKRAELYCPRPLLAIEVSSQDRHKQKIIAPAKQLLNFDLLKLAGDVESNPGP

SEQ ID NO: 367 - DNA, 2249 bp, Artificial Sequence
  P1_Asia1_Shamir_cut_sites_removed
ggagccggtcaatccagtccggcaaccgggtcacagaaccaatctggcaacactggaagcatcattaacaactactacatgcaacagtaccagaactcaatggacacacagcttggtgacaacgctattagcggaggttccaacgaaggttccacggataccacttccacacacacaaacaacacccaaaacaacgactggttctcgcgcctggcaagctctgcattcagtggactatttggtgcacttttggctgacaagaagacagaagagacaactctgcttgaagaccgcattctcaccaccaggaacggccacacaacatcgacgacacagtcgagcgttggcgtaacatacggttacgctgtggccgaggacgcggtgtctggacccaatacctcgggactcgagactcgtgttcaacaggcagaacggtttttcaagaaacacctgtttgactggacaccgaacttggcatttggacactgttactacctggaacttcccactgaacacaaaggcgtgtacggcagtctcatgggctcatacgcctacatgagaaatggatgggacatagaggtgactgctgttggaaaccaattcaacggtggttgtctccttgtcgcgctcgtgccagagctgaaggaactcgacacgcgacagaagtaccaactgaccctctttccccaccagttcatcaacccacgcaccaacatgacggcccacatcaacgtgccatacgtgggtatcaacaggtacgaccagtacgccctccacaagccgtggacgcttgttgtgatggtggtagccccactcaccgtcaaaactggtggttctgaacagatcaaggtttacatgaatgcagcgccaacctacgtgcatgtggcgggagagctgccctcgaaagagggaatagttcccgtcgcgtgtgcggacggttacggcaacatggtgacaacggacccgaagacggccgatccagtttacgggaaagtgttcaacccccccaggacaaacctccctgggcgcttcacgaacttccttgatgttgcggaggcatgtccaactttcctccgctttggagaagtaccatttgtgaagacggtgaactctggagaccgcttgctggccaagttcgacgtgtccctcgcagcagggcacatgtccaacacctacttggctggcctggcgcagtactacacacagtacagcggcaccatgaacgtccacttcatgttcaccggacccacggatgctaaagcccgatacatggtggcttatgtcccccctggcatgacaccgcccacggaccctgagcacgccgcacactgcattcactctgagtgggatactggtcttaactctaagtttaccttttccataccttacctctctgctgctgactatgcctacactgcttctgacgtggcggagaccacgagtgtgcagggatgggtgtgtatctatcagatcacccacggcaaggctgagggagacgcactggtcgtttctgtcagcgccggcaaagactttgagtttcgcttgcctgttgacgcacgccagcaaaccaccaccactggcgaatcagcagatccagtcacaaccacggttgagaactatggaggagagactcagacagccagacggcttcacactgacgtcgccttcattcttgacaggtttgtgaaactcactgctcccaagaacatccaaaccctcgatctcatgcagatcccctcacacacgctggttggagcactacttcgttctgcgacgtactacttctcagacctggaggtcgcgcttgtccacacaggcccagtcacctgggtgcccaacggagcgcccaaggatgctctaaacaaccagaccaacccaactgcctatcagaagcaacccatcacccgcctggcactcccctacaccgccccccatcgtgtgctggcaacagtgtacaacgggaagacggcttacggggaaacgacctcaaggcgcggcgacatggcggccctcgcacaaaggttgagcgctcggctgcccacctccttcaactacggcgccgtgaaggccgacaccatcactgagcttttgatccgcatgaagcgcgcggagacatattgccctaggcctttactagcccttgacaccactcaggaccgccgcaaacaggagatcattgcacctgagaagcaggttttgaactttgacctactcaagttggcaggagacgttgagtccaaccccgggcc

SEQ ID NO: 368 - DNA, 2250 bp, Foot-and-mouth disease virus
  CDS (1)..(2250)
  misc_feature (1)..(2250): P1_Asia1_Shamir_wildtype
ggagccggtcaatccagtccggcaaccgggtcacagaaccaatctggcaacactggaagcatcattaacaactactacatgcaacagtaccagaattccatggacacacagcttggtgacaacgctattagcggaggttccaacgaaggttccacggataccacttccacacacacaaacaacacccaaaacaacgactggttctcgcgcctggctagctctgcattcagtggtctctttggtgcacttttggctgacaagaagacagaagagacaactctgcttgaagaccgcattctcaccaccaggaacggccacacaacatcgacgacacagtcgagcgttggcgtaacatacggttacgctgtggccgaggacgcggtgtctggacccaatacctcgggtctagagactcgtgttcaacaggcagaacggtttttcaagaaacacctgtttgactggacaccgaacttggcatttggacactgttactacctggaacttcccactgaacacaaaggcgtgtacggcagtctcatgggctcgtacgcctacatgagaaatggatgggacatagaggtgactgctgttggaaaccaattcaacggtggttgtctccttgtcgcgctcgtgccagagctgaaggaactcgacacgcgacagaagtaccagctgaccctctttccccaccagttcatcaacccacgcaccaacatgacggcccacatcaacgtgccgtacgtgggtatcaacaggtacgaccagtacgccctccacaagccgtggacgcttgttgtgatggtggtagccccactcaccgtcaaaactggtggttctgaacagatcaaggtttacatgaatgcagcgccaacctacgtgcatgtggcgggagagctgccctcgaaagagggaatagttcccgtcgcgtgtgcggacggttacggcaacatggtgaccacggacccgaagacggccgatccagtttacgggaaagtgttcaacccccccaggacaaacctccctgggcgcttcacgaacttccttgatgttgcggaggcatgtccaactttcctccgctttggagaagtaccatttgtgaagacggtgaactctggtgaccgcttgctggccaagttcgacgtgtccctcgctgcagggcacatgtccaacacctacttggctggcctggcgcagtactacacacagtacagcggcaccatgaacgtccacttcatgttcaccgggcccacggatgctaaagcccgatacatggtggcttatgtcccccctggcatgacaccgcccacggaccctgagcacgccgcacactgcattcactctgagtgggatactggtcttaactctaagtttaccttttccataccttacctctctgctgctgactatgcctacactgcttctgacgtggcggagaccacgagtgtgcagggatgggtgtgtatctatcagatcacccacggcaaggctgagggagacgcactggtcgtttctgtcagcgccggcaaagactttgagtttcgcttgcctgttgacgcacgccagcaaaccaccaccactggcgaatcagcagatccagtcacaaccacggttgagaactatggaggagagactcagacagccagacggcttcacactgacgtcgccttcattcttgacaggtttgtgaaactcactgctcccaagaacatccaaaccctcgatctcatgcagatcccctcacacacgctggttggagcactacttcgttctgcgacgtactacttctcagacctggaggtcgcgcttgtccacacaggcccggtcacctgggtgcccaacggcgcgcccaaggatgctctaaacaaccagaccaacccaactgcctatcagaagcaacccatcacccgcctggcactcccctacaccgccccccatcgtgtgctggcaacagtgtacaacgggaagacggcgtacggggaaacgacctcaaggcgcggcgacatggcggccctcgcacaaaggttgagcgctcggctgcccacctccttcaactacggcgccgtgaaggccgacaccatcactgagcttttgatccgcatgaagcgcgcggagacatattgccctaggcctttactagcccttgacaccactcaggaccgccgcaaacaggagatcattgcacctgagaagcaggttttgaactttgacctactcaagttggcaggagacgttgagtccaaccctgggccc

SEQ ID NO: 369 - protein, 750 aa, Foot-and-mouth disease virus
GAGQSSPATGSQNQSGNTGSIINNYYMQQYQNSMDTQLGDNAISGGSNEGSTDTTSTHTNNTQNNDWFSRLASSAFSGLFGALLADKKTEETTLLEDRILTTRNGHTTSTTQSSVGVTYGYAVAEDAVSGPNTSGLETRVQQAERFFKKHLFDWTPNLAFGHCYYLELPTEHKGVYGSLMGSYAYMRNGWDIEVTAVGNQFNGGCLLVALVPELKELDTRQKYQLTLFPHQFINPRTNMTAHINVPYVGINRYDQYALHKPWTLVVMVVAPLTVKTGGSEQIKVYMNAAPTYVHVAGELPSKEGIVPVACADGYGNMVTTDPKTADPVYGKVFNPPRTNLPGRFTNFLDVAEACPTFLRFGEVPFVKTVNSGDRLLAKFDVSLAAGHMSNTYLAGLAQYYTQYSGTMNVHFMFTGPTDAKARYMVAYVPPGMTPPTDPEHAAHCIHSEWDTGLNSKFTFSIPYLSAADYAYTASDVAETTSVQGWVCIYQITHGKAEGDALVVSVSAGKDFEFRLPVDARQQTTTTGESADPVTTTVENYGGETQTARRLHTDVAFILDRFVKLTAPKNIQTLDLMQIPSHTLVGALLRSATYYFSDLEVALVHTGPVTWVPNGAPKDALNNQTNPTAYQKQPITRLALPYTAPHRVLATVYNGKTAYGETTSRRGDMAALAQRLSARLPTSFNYGAVKADTITELLIRMKRAETYCPRPLLALDTTQDRRKQEIIAPEKQVLNFDLLKLAGDVESNPGP

SEQ ID NO: 370 - DNA, 2247 bp, Artificial Sequence
  P1_C3_cut_sites_removed
ggagccggacaatccagcccggcgactggctcgcagaaccaatctggcaacactggtagcataatcaacaactactacatgcaacagtaccaaaattcaatggacacacaactgggtgacaatgctattagtggtggctccaacgagggctccacagatacaacttccacccacacaaccaacactcaaaacaacgactggttttccaaactcgccagttctgcctttagcggtcttttcggtgctcttcttgccgacaagaagaccgaggaaaccacactacttgaagaccgcatcctcaccacccgcaacggccacacgacttcgacaactcagtcgagcgttggggtcacatacgggtacgcaacaactgaggatagcacgtcagggcctaacacatccggccttgagacacgtgttcaccaggcagaacggtttttcaagatgacactctttgaatgggttccctcccagagttttggacacatgcacaaggtcgttctgccctcagaaccgaaaggtgtctatgggggtctcgtcaagtcttatgcgtacatgcgcaatggctgggacgttgaggtgactgctgttggaaaccagttcaacggcggttgtctcctggtggcgctcgttcctgaaatgggtgacatcagtgacagagagaagtaccaactgactctctacccccaccaattcatcaacccacgcactaacatgacggcacacatcaccgtgccttacgtgggtgtcaacagatacgaccaatacaaccaacacaagccctggactcttgtcgtcatggtcgttgctccacttactgtgaacacatcaggtgcccagcagatcaaggtgtatgccaacatagccccaaccaacgttcacgttgctggtgaacttccctccaaggaggggatcttccccgttgcgtgtgccgacggctatggcaacatggtgacaactgacccgaagacggctgaccctgcctacgggaaagtctataatccacccaggaccgccctgccgggccggttcacaaactacctggatgttgctgaggcttgccccactctcctgacgttcgagaacgtgccttacgtttcaacacggactgatggacaaaggctgttggccaagttcgacgtgtcattggcagcgaaacacatgtcaaacacttacttggctggcttggcccagtactacacacagtacgctgggacaatcaacctgcacttcatgttcactgggccaaccgacgcgaaagctcggtacatggtggcatacgtgccccctggcatggaagcaccagacaacccagaggaggctgcccactgcatacacgcagagtgggacactggtttgaactctaagttcacattttcaatcccgtacatctcggccgctgactacgcatacaccgcgtccagcgaggctgaaacaacaagcgtacagggatgggtttgtgtgtaccagatcactcacggcaaggcagacgctgacgcgctcgtcgtctccgcttcggcggggaaagactttgaactccggctacctgtggacgctagacagcaaactacgaccactggcgaatctgccgaccccgtcaccactaccgttgagaactacggaggagaaacacaaactcaacgtcgccaccacactgacgttgccttcgttcttgatcggtttgtgaaggtccaggtgtcgggcaaccaacacacactggacgttatgcaggtacacaaggacagtattgtgggtgcactcctacgcgcagccacatactacttctctgacttggaaatagcagtgactcacactgggaagctcacatgggtgcccaacggcgccccagtttctgcacttgacaacacaaccaaccccactgcctaccacaaggggccgctgactcggctggctctcccatacaccgcaccacaccgcgtgctggccacggcgtacactggtacaacggcctacactacaggtgtacgcaggggagacctagcccacttggcggcggcgcacgctcggcacctgccaacgtcgttcaactttggtgcagttaaagcagagacaatcacagagctgcttgtgcgcatgaagcgtgctgaactctactgccccaggccggtccttccggtccaaccagcgggcgataggcacaaacaaccgctcattgcgccagcgaaacaactgctgaacttcgaccttctcaagttggcgggagatgtcgagtccaaccctgggccc

SEQ ID NO: 371 - DNA, 2247 bp, Foot-and-mouth disease virus
  CDS (1)..(2247)
  misc_feature (1)..(2247): P1_C3_wildtype
ggagccggacaatccagcccggcgactggctcgcagaaccaatctggcaacactggtagcataatcaacaactactacatgcaacagtaccaaaattccatggacacacagctgggtgacaatgctattagtggtggctccaacgagggctccacagatacaacttccacccacacaaccaacactcaaaacaacgactggttttccaaactcgccagttctgcctttagcggtcttttcggtgctcttcttgccgacaagaagaccgaggaaaccacactacttgaagaccgcatcctcaccacccgcaacggccacacgacgtcgacaactcagtcgagcgttggggtcacatacgggtacgcaacaactgaggatagcacgtcagggcccaacacatccggccttgagacacgtgttcaccaggcagaacggtttttcaagatgacactctttgaatgggttccctcccagagttttggacacatgcacaaggtcgttctgccctcagaaccgaaaggtgtctatgggggtctcgtcaagtcatacgcgtacatgcgcaatggctgggacgttgaggtgactgctgttggaaaccagttcaacggcggttgtctcctggtggcgctcgttcctgaaatgggtgacatcagtgacagagagaagtaccaactgactctctacccccaccaattcatcaacccacgcactaacatgacggcacacatcaccgtgccttacgtgggtgtcaacagatacgaccaatacaaccaacacaagccctggactcttgtcgtcatggtcgttgctccacttactgtgaacacatcaggtgcccagcagatcaaggtgtatgccaacatagccccaaccaacgttcacgttgctggtgaacttccctccaaggaggggatcttccccgttgcgtgtgccgacggctatggcaacatggtgacaactgacccgaagacagctgaccctgcctacgggaaagtctacaatccacccaggaccgccctgccgggccggttcacaaactacctggatgttgctgaggcttgccccactctcctgacgttcgagaacgtgccttacgtttcaacacggactgatggacaaaggctgttggccaagttcgacgtgtcattggcagcgaaacacatgtcaaacacttacttggctggcttggcccagtactacacacagtacgctgggacaatcaacctgcacttcatgttcactgggccaaccgacgcgaaagctcggtacatggtggcatacgtgccccctggcatggaagcaccagacaacccagaggaggctgcccactgcatacacgcagagtgggacactggtttgaactctaagttcacattttcaatcccgtacatctcggccgctgactacgcatacaccgcgtccagcgaggctgaaacaacaagcgtacagggatgggtttgtgtgtaccagatcactcacggcaaggcagacgctgacgcgctcgtcgtctccgcttcggcggggaaagactttgagctccggctacctgtggacgctagacagcaaactacgaccactggcgaatctgccgaccccgtcaccactaccgttgagaactacggaggagaaacacaaactcaacgtcgccaccacactgacgttgccttcgttcttgaccggtttgtgaaggtccaggtgtcgggcaaccaacacacactggacgttatgcaggtacacaaggacagtattgtgggtgcactcctacgcgcagccacatactacttctctgacttggaaatagcagtgactcacactgggaagctcacatgggtgcccaacggcgccccagtttctgcacttgacaacacaaccaaccccactgcctaccacaaggggccgctgactcggctggctctcccatacaccgcaccacaccgcgtgctggccacggcgtacaccggtacaacggcctacactaccggtgtacgcaggggagacctagcccacttggcggcggcgcacgctcggcacctgccgacgtcgttcaactttggtgcagttaaagcagagacaatcacagagctgcttgtgcgcatgaagcgtgctgaactctactgccccagaccggtccttccggtccaaccagcgggcgataggcacaaacaaccgctcattgcgccagcgaaacagctgctgaacttcgaccttctcaagttggcgggagacgtcgagtccaaccctgggccc

SEQ ID NO: 372 - protein, 749 aa, Foot-and-mouth disease virus
GAGQSSPATGSQNQSGNTGSIINNYYMQQYQNSMDTQLGDNAISGGSNEGSTDTTSTHTTNTQNNDWFSKLASSAFSGLFGALLADKKTEETTLLEDRILTTRNGHTTSTTQSSVGVTYGYATTEDSTSGPNTSGLETRVHQAERFFKMTLFEWVPSQSFGHMHKVVLPSEPKGVYGGLVKSYAYMRNGWDVEVTAVGNQFNGGCLLVALVPEMGDISDREKYQLTLYPHQFINPRTNMTAHITVPYVGVNRYDQYNQHKPWTLVVMVVAPLTVNTSGAQQIKVYANIAPTNVHVAGELPSKEGIFPVACADGYGNMVTTDPKTADPAYGKVYNPPRTALPGRFTNYLDVAEACPTLLTFENVPYVSTRTDGQRLLAKFDVSLAAKHMSNTYLAGLAQYYTQYAGTINLHFMFTGPTDAKARYMVAYVPPGMEAPDNPEEAAHCIHAEWDTGLNSKFTFSIPYISAADYAYTASSEAETTSVQGWVCVYQITHGKADADALVVSASAGKDFELRLPVDARQQTTTTGESADPVTTTVENYGGETQTQRRHHTDVAFVLDRFVKVQVSGNQHTLDVMQVHKDSIVGALLRAATYYFSDLEIAVTHTGKLTWVPNGAPVSALDNTTNPTAYHKGPLTRLALPYTAPHRVLATAYTGTTAYTTGVRRGDLAHLAAAHARHLPTSFNFGAVKAETITELLVRMKRAELYCPRPVLPVQPAGDRHKQPLIAPAKQLLNFDLLKLAGDVESNPGP

SEQ ID NO: 373 - DNA, 2259 bp, Artificial Sequence
  P1_O1_Manissa_cut_sites_removed
ggagccgggcaatccagcccggcaaccgggtcacagaaccaatcaggcaacactgggagcatcatcaacaattactacatgcagcagtaccaaaactctatggacacacaacttggtgacaacgctacaagcggaggctcaaacgaggggtccacggacacaacctccacccacacaaccaacactcagaacaacgactggttctcgaagctggccagttccgctttcagcggtcttttcggcgctcttctcgccgacaagaaaaccgaggagaccactcttcttgaggaccgcatcctcactactcgtaacggacacaccacctcgacaacccagtcgagcgtaggagtcacatacgggtatgcaacggctgaggatttcgtgagcgggccaaacacctctggtcttgagaccagggttgcccaggcagagcggttctttaaaacccacctgttcgactgggtcacaagtgacccgttcggacggtgccacctgctagaacttccaactgaccacaaaggtgtctatggcagcctgaccgactcgtatgcttatatgaggaacggctgggatgttgaagtcactgctgtgggaaatcagttcaatggaggatgcctgttggtggctatggtgccagaactttgctccatacagaagagggagctgtaccagctcacgctctttcctcaccagttcatcaaccctcggacgaacatgacagcacacatcactgtgccctttgttggcgtcaaccgttatgaccagtacaaggtacacaaaccttggaccctcgtggttatggttgtagcccccctgaccgtcaacagtgaaggtgccccgcaaatcaaggtgtatgccaacatcgcacctaccaacgtacacgtcgcgggtgagttcccttccaaagaggggatcttccctgtggcttgcagcgatggttatggcggtctggtgacaactgacccgaaaacggctgaccccgcttacgggaaagtgtttaaccccccccgcaacatgttgccggggcggttcaccaattttcttgacgtggctgaggcgtgccccacgtttctccacttcgagggtgacgtgccatacgtgaccacgaagacggattcagacagggtgctcgctcagttcgacttgtctttggcagcaaagcacatgtccaacaccttccttgcaggtctcgcccagtactacacacagtacagcggcaccatcaacctgcacttcatgttcacagggcctactgacgcgaaggcgcgttacatgattgcgtatgctcctcctggcatggaaccacctaaaacgccagaggcggctgcccactgcatccatgctgaatgggacacagggttgaactcaaaattcacattttcaatcccttacctttcggcggctgattacgcttacacagcgtctgacactgctgagaccacaaatgtacagggatgggtttgcctgtttcaaataacacacgggaaagctgacggcgacgcactggtcgttttggccagcgccggaaaggactttgagctgcgcctgccggtggatgctcgcacacagactacctcagcgggcgagtcagcagaccccgtgaccgccaccgttgagaattacggtggcgagacacaggtccagaggcgccaacacacggacgtgtcatttatattagacagatttgtgaaagtgacaccaaaagaccaaattaatgtattggacctgatgcaaacccctgctcacactttggtgggagcactccttcgtactgccacttactatttcgctgacttagaggtggcagtgaagcacgagggaaacctcacctgggtgccgaacggggcgcctgaagcggcgttggacaacaccaccaacccaacagcttaccacaaggcaccactcacccgacttgcactgccttacacggcgccacaccgcgtgttggctactgtttacaacgggaacagcaagtatggtgacggcacggtggccaatgtgagaggtgatctgcaagtgttggcccagaaggcggcgagagcgctgcctacctccttcaactacggtgccattaaagctactcgggtgactgaactgctttaccgcatgaagagggctgagacatactgtccccggcctcttttggccattcacccggaccaggctagacacaagcagaagattgtggctccggtgaaacagcttctaaattttgacctgctcaaattggcgggagatgtggagtccaaccctgggccc

SEQ ID NO: 374 - DNA, 2259 bp, Foot-and-mouth disease virus
  CDS (1)..(2259)
  misc_feature (1)..(2259): P1_01_Marissa_wild_type
ggagccgggcaatccagcccggcaaccgggtcacagaaccaatcaggcaacactgggagcatcatcaacaattactacatgcagcagtaccaaaactccatggacacacaacttggtgacaacgctacaagcggaggctcaaacgaggggtccacggacacaacctccacccacacaaccaacactcagaacaacgactggttctcgaagctggccagttccgctttcagcggtcttttcggcgctcttctcgccgacaagaaaaccgaggagaccactcttctcgaggaccgcatcctcactactcgtaacggacacaccacctcgacaacccagtcgagcgttggagtcacgtacgggtatgcaacagctgaggatttcgtgagcgggccaaacacctctggtctcgagaccagggttgcccaggcagagcggttctttaaaacccacctgttcgactgggtcaccagtgacccgttcggacggtgccacctgctggaacttccaactgaccacaaaggtgtctacggcagcctgaccgactcgtatgcttatatgaggaacggctgggatgttgaagtcactgcagtgggaaaccagttcaatggaggatgcctgttggtggccatggtgccagaactttgctccatacagaagagggagctgtaccagctcacgctctttcctcaccagttcatcaaccctcggacgaacatgacagcacacatcactgtgccctttgttggcgtcaaccgttatgaccagtacaaggtacacaaaccttggaccctcgtggttatggttgtagcccccctgaccgtcaacagtgaaggtgccccgcaaatcaaggtgtatgccaacatcgcacctaccaacgtacacgtcgcgggtgagttcccttccaaagaggggatcttccctgtggcttgcagcgatggttatggcggtctggtgaccactgacccgaaaacggctgaccccgcttacgggaaagtgtttaaccccccccgcaacatgttgccggggcggttcaccaattttcttgacgtggctgaggcgtgccccacgtttctccacttcgagggtgacgtgccatacgtgaccacgaagacggattcagacagggtgctcgctcagttcgacttgtctttggcagcaaagcacatgtcgaacaccttccttgcaggtctcgcccagtactacacacagtacagcggcaccatcaacctgcacttcatgttcacagggcctactgacgcgaaggcgcgttacatgattgcgtatgctcctcctggcatggaaccacctaaaacgccagaggcggctgcccactgcattcatgctgaatgggacacagggttgaactcaaaattcacattttcaatcccttacctttcggcggctgattacgcttacacagcgtctgacactgctgagaccacaaatgtacagggatgggtttgcctgtttcaaataacacacgggaaagctgacggcgacgcactggtcgttttggctagcgccggaaaggactttgagctgcgcctgccggtggatgctcgcacacagactacctccgcgggcgagtcagctgaccccgtgaccgccaccgttgagaattacggtggcgagacacaggtccagaggcgccaacacacggacgtctcatttatattagacagatttgtgaaagtgacaccaaaagaccaaattaatgtattggacctgatgcaaacccctgctcacactttggtgggagcactccttcgtactgccacttactatttcgctgacttagaggtggcagtgaagcacgagggaaacctcacctgggtcccgaacggggcgcctgaagcggcgttggacaacaccaccaacccaacagcttaccacaaggcaccactcacccgacttgcactgccttacacggcgccacaccgcgtgttggctactgtttacaacgggaacagcaagtatggtgacggcacggtggccaatgtgagaggtgacctgcaagtgttggcccagaaggcggcgagagcgctgcctacctccttcaactacggtgccattaaagctactcgggtgactgaactgctttaccgcatgaagagggctgagacatactgtccccggcctcttttggccattcacccggaccaggctagacacaagcagaagattgtggcaccggtgaaacagcttctaaattttgacctgctcaaattggcgggagatgtggagtccaaccctgggccc

SEQ ID NO: 375 - protein, 753 aa, Foot-and-mouth disease virus
GAGQSSPATGSQNQSGNTGSIINNYYMQQYQNSMDTQLGDNATSGGSNEGSTDTTSTHTTNTQNNDWFSKLASSAFSGLFGALLADKKTEETTLLEDRILTTRNGHTTSTTQSSVGVTYGYATAEDFVSGPNTSGLETRVAQAERFFKTHLFDWVTSDPFGRCHLLELPTDHKGVYGSLTDSYAYMRNGWDVEVTAVGNQFNGGCLLVAMVPELCSIQKRELYQLTLFPHQFINPRTNMTAHITVPFVGVNRYDQYKVHKPWTLVVMVVAPLTVNSEGAPQIKVYANIAPTNVHVAGEFPSKEGIFPVACSDGYGGLVTTDPKTADPAYGKVFNPPRNMLPGRFTNFLDVAEACPTFLHFEGDVPYVTTKTDSDRVLAQFDLSLAAKHMSNTFLAGLAQYYTQYSGTINLHFMFTGPTDAKARYMIAYAPPGMEPPKTPEAAAHCIHAEWDTGLNSKFTFSIPYLSAADYAYTASDTAETTNVQGWVCLFQITHGKADGDALVVLASAGKDFELRLPVDARTQTTSAGESADPVTATVENYGGETQVQRRQHTDVSFILDRFVKVTPKDQINVLDLMQTPAHTLVGALLRTATYYFADLEVAVKHEGNLTWVPNGAPEAALDNTTNPTAYHKAPLTRLALPYTAPHRVLATVYNGNSKYGDGTVANVRGDLQVLAQKAARALPTSFNYGAIKATRVTELLYRMKRAETYCPRPLLAIHPDQARHKQKIVAPVKQLLNFDLLKLAGDVESNPGP

SEQ ID NO: 376 - DNA, 2259 bp, Artificial Sequence
  P1_O1_pan_Asia_cut_sites_removed
ggtgctgggcaatccagcccggcgactgggtcacagaaccagtcaggcaacactggaagcatcatcaacaactactacatgcagcagtaccagaactccatggacacacaacttggtgacaacgctatcagcggaggctctaacgaaggttctacagacaccacctccacccacacaaccaacactcagaacaacgactggttttcaaaactagccagttccgctttcagcggtcttttcggcgctcttctcgccgacaagaaaaccgaggagactactcttcttgaggaccgcatcctcactacccgtaacggacacacaacctcgacaacccagtcgagcgttggagtcacttacgggtacgcaacagccgaggattttgtgagcgggccaaacacatctggccttgagaccagggttgtgcaagcagagcggttcttcaaaacccacttgttcgattgggtcactagtgactcgttcggacgatgccacctgctggaacttccaactgaccacaaaggtgtctatggcagcctgactgattcttatgcgtacatgagaaacggttgggatgtcgaggtcactgcggtgggaaaccagttcaacggaggatgcctgttggtggccatggtgccagaactctgctctatcagcaaaagagagctgtaccagctcacgctctttccccaccagttcatcaacccccggacgaacatgacggcacacatcaccgtgccctttgtcggcgtcaaccgctacgaccagtacaaggtacacaaaccttggaccctcgtggtcatggtcgtggccccgctgactgtcaacactgaaggtgctccacagatcaaggtttatgccaacatcgcccctaccaacgtgcacgtcgcgggtgagttcccctccaaggaagggatcttccccgtggcctgcagtgacggttacggcggtcttgtgaccactgacccaaagacggctgaccccgtttacgggaaagttttcaatccccctcgcagcatgttgccagggcgattcaccaacttccttgatgtggctgaggcgtgccctacgtttctgcattttgagggtgacgtaccatacgtgaccacaaagacggattcggacagggttctcgctcagtttgacttgtctttggcagcgaagcacatgtcaaacacctttcttgcaggtctcgcccagtactacgcacagtacagtggcactattaacctgcacttcatgttcacagggccaactgacgcgaaagcgcgttacatgattgcctatgccccccccggcatggagccgcctaaaacacctgaggcagccgctcactgcattcacgcggagtgggatactggattgaactcaaaattcacattctcaatcccttacctctcggcggctgactatgcgtacaccgcgtctgacaccgccgagaccacaaatgtacagggatgggtttgcctgtttcaaatcacgcacgggaaggccgatggtgacgcacttgttgtcctggccagcgccggtaaggacttcgagctgcggttgccagttgatgcccgcacgcagaccacctccacaggtgagtcagctgaccccgtgactgccactgttgagaactacggtggcgaaacacaggtccagagacgccagcacacggacgtctcgtttatattggacagatttgtgaaagtgacaccaaaagaccaaatcaatgtgttggacctgatgcaaacccccgcccacactttggtaggtgcactcctccgcaccgccacctactacttcgcagatttagaggtggcagtaaaacacgaggggaaccttacctgggtcccgaatggggcgcccgagacagcgttggataacaccactaatccaacggcttaccacaaggcaccgctcactcgtcttgcactgccttacacggcaccgcaccgtgtcttggctaccgtttacaacgggaactgcaagtacgacgagagcagcacaaccaacgtgagaggagacctgcaagtgttggcccaaaaggcggcgaggacgctgcccacctccttcaactacggtgccatcaaagctacacgggtgaacgagttgctttaccgcatgaagagggctgaaacatactgcccccggcctcttttggccattcatccgaatgaagcaagacacaagcaaaagatagtggcacctgcgaagcaactcctgaacttcgacctgctcaagttggcgggagacgttgagtccaaccccgggccc

SEQ ID NO: 377 - DNA, 2259 bp, Foot-and-mouth disease virus
  CDS (1)..(2259)
  misc_feature (1)..(2259): P1_O1_pan_Asia_wildtype
ggtgctgggcaatccagcccggcgactgggtcacagaaccagtcaggcaacactggaagcatcatcaacaactactacatgcagcagtaccagaactccatggacacacaacttggtgacaacgctatcagcggaggctctaacgaagggtctacagacaccacctccacccacacaaccaacactcagaacaacgactggttttcaaaactagccagttccgctttcagcggtcttttcggcgctcttctcgccgacaagaaaaccgaggagactactcttctcgaggaccgcatcctcactacccgtaacggacacacaacctcgacaacccagtcgagcgttggagtcacttacgggtacgcaacagccgaggattttgtgagcgggccaaacacatctggccttgagaccagggttgtgcaagcagagcggttcttcaaaacccacttgttcgattgggtcactagtgactcgttcggacgatgccacctgctggaacttccaactgaccacaaaggtgtctacggcagcctgactgattcttatgcgtacatgagaaacggttgggatgtcgaggtcactgcggtgggaaaccagttcaacggaggatgcctgttggtggccatggtgccagaactctgctctatcagcaaaagagagctgtaccagctcacgctctttccccaccagttcatcaacccccggacgaacatgacggcacacatcaccgtgccctttgtcggcgtcaaccgctacgaccagtacaaggtacacaaaccttggaccctcgtggtcatggtcgtggccccgctgactgtcaacactgaaggtgctccacagatcaaggtttatgccaacatcgcccctaccaacgtgcacgtcgcgggtgagttcccctccaaggaagggatcttccccgtggcctgcagtgacggttacggcggtcttgtgaccactgacccaaagacggctgaccccgtttacgggaaagttttcaatccccctcgcagcatgttgccagggcgattcaccaacttccttgatgtggctgaggcgtgccctacgtttctgcattttgagggtgacgtaccatacgtgaccacaaagacggattcggacagggttctcgctcagtttgacttgtctttggcagcgaagcacatgtcaaacacctttcttgcaggtctcgcccagtactacgcacagtacagtggcactattaacctgcacttcatgttcacagggcccactgacgcgaaagcgcgttacatgattgcatatgccccccccggcatggagccgcctaaaacacctgaggcagccgctcactgcattcacgcggagtgggatactggattgaattcaaaattcacattctcaatcccttacctctcggcggctgactacgcgtacaccgcgtctgacaccgccgagaccacaaatgtacagggatgggtttgcctgtttcaaatcacgcacgggaaggccgatggtgacgcacttgttgtcctggctagcgccggtaaggacttcgagctgcggttgccagttgatgcccgcacgcagaccacctccacaggtgagtcagctgaccccgtgactgccactgttgagaactacggtggcgaaacacaggtccagagacgccagcacacggacgtctcgtttatattggacagatttgtgaaagtgacaccaaaagaccaaatcaatgtgttggacctgatgcaaacccccgcccacactttggtaggtgcactcctccgcaccgccacctactacttcgcagatttagaggtggcagtaaaacacgaggggaaccttacctgggtcccgaatggggcgcccgagacagcgttggataacaccactaatccaacggcttaccacaaggcaccgctcactcgtcttgcactgccttacacggcaccgcaccgtgtcttggctaccgtttacaacgggaactgcaagtacgacgagagcagcacaaccaacgtgagaggtgacctgcaagtgttggcccaaaaggcggcgaggacgctgcccacctccttcaactacggtgccatcaaagctacccgggtgaacgagttgctttaccgcatgaagagggctgaaacatactgcccccggcctcttttggccattcatccgaatgaagcaagacacaagcaaaagatagtggcacctgcgaagcaactcctgaacttcgacctgctcaagttggcgggagacgttgagtccaaccctgggccc

SEQ ID NO: 378 - protein, 753 aa, Foot-and-mouth disease virus
GAGQSSPATGSQNQSGNTGSIINNYYMQQYQNSMDTQLGDNAISGGSNEGSTDTTSTHTTNTQNNDWFSKLASSAFSGLFGALLADKKTEETTLLEDRILTTRNGHTTSTTQSSVGVTYGYATAEDFVSGPNTSGLETRVVQAERFFKTHLFDWVTSDSFGRCHLLELPTDHKGVYGSLTDSYAYMRNGWDVEVTAVGNQFNGGCLLVAMVPELCSISKRELYQLTLFPHQFINPRTNMTAHITVPFVGVNRYDQYKVHKPWTLVVMVVAPLTVNTEGAPQIKVYANIAPTNVHVAGEFPSKEGIFPVACSDGYGGLVTTDPKTADPVYGKVFNPPRSMLPGRFTNFLDVAEACPTFLHFEGDVPYVTTKTDSDRVLAQFDLSLAAKHMSNTFLAGLAQYYAQYSGTINLHFMFTGPTDAKARYMIAYAPPGMEPPKTPEAAAHCIHAEWDTGLNSKFTFSIPYLSAADYAYTASDTAETTNVQGWVCLFQITHGKADGDALVVLASAGKDFELRLPVDARTQTTSTGESADPVTATVENYGGETQVQRRQHTDVSFILDRFVKVTPKDQINVLDLMQTPAHTLVGALLRTATYYFADLEVAVKHEGNLTWVPNGAPETALDNTTNPTAYHKAPLTRLALPYTAPHRVLATVYNGNCKYDESSTTNVRGDLQVLAQKAARTLPTSFNYGAIKATRVNELLYRMKRAETYCPRPLLAIHPNEARHKQKIVAPAKQLLNFDLLKLAGDVESNPGP

SEQ ID NO: 379 - DNA, 2289 bp, Artificial Sequence
  P1_SAT1_KNP/196/91_cut_sites_removed
ggagcgggccagtcgtcccccgccactgggtcacagaaccagtcaggcaacactggcagcatcatcaacaactactacatgcaacagtaccaaaattcaatggacacccaactcggagacaacgccatctccggtgggtcaaatgagggttcgaccgacacaacttcgacccacaccagcaacacccaaaacaacgattggttttcaaaattggctcaatcggccttctctggattggttggtgcgttgcttgccgacaagaagactgaggaaaccacactccttgaggatcgcatcctcacgaccagtcacggcacaaccacctcgaccacacaaagttcagtgggcataacctacggttacgccgactcggaccgtttcctccccggcccaaacaccaacgggctggagacacgtgtggaacaagcagagaggtttttcaaacacaaattatttgattggacacttgaacaacgatttggaacaacacacgttttggaactgcccacagaccacaaaggcatctatggacaacttgttgactcccactcatacattcgcaatgggtgggacgttgaggtctccgcgaccgcaacgcagttcaacgggggctgcctcctggtagcgatggtgcccgaattgtgcaaactgtcggaaagagagaaataccaactcactctcttccctcatcaatttctagacccaaggaccaacaccacggcacacatccaggttccctacctgggcgtggatcgccacgaccaaggaacacgccacaaagcgtggaccctggttgtcatggtggtggcaccctacacaaacgatcagacgattggctcgaacaaagccgaggtgtacgtgaacattgctcccacaaacgtttacgtcgccggtgagaagcccgcaaaacagggcattctccccgtggccgtctccgttggctatggtggcttccaaaatacagatcccaaaacatcggaccccgtatatgggcacgtgtacaacccggctcgcaccggcctacctgggaggttcacaaacctcttggatgtggctgaagcgtgccctacactgcttgacttcaacggagttccgtatgtgaccacccaggcaaactcaggatctaaagtgttaacttgttttgatttggcttttggtcacaaaaatttgaaaaatacatttatgtctggtcttgcccagtactacacccagtacagtggcacactcaacctgcacttcatgtacacaggcccaaccaacaacaaggctaagtacatggtggcctacatcccacctgggacacaccctctcccggaaacaccggagatggagtcccactgtcaccacgccgagtgggacacaggcctgaactcaaccttcacattcaccgtgccgtatgtgtcggctgccgacttcgcgtacacctactctgacgagcctgaacaggcttcggttcagggttgggtgggcgtatatcaggtgactgacacacacgagaaggacggtgcagttgttgtgtccgtcagtgctggacccgacttcgagttcaggatgcccatcagcccctcgcgccagaccacatccgctggcgaaggagcggagcctgtcacgactgatgcttcccaacacggaggcgacagacggacaactcgtaggcatcacactgatgtgagcttcttgctcgatcggttcacactggttggtaaaacacaggacaacaaactgacactagacctgctccaaaccaaggaaaaagcactggttggcgcaatcctgcgcgcagccacgtactacttctctgacttggaggttgcgtgtgtgggtgacaacaaatgggtcggctggactcccaacggtgctccagaacttgcggaagtgggcgacaacccagtcgtcttttccaaaggtagaaccacccgttttgcactgccctacaccgctccacacaggtgcttggcgacagcctacaacggtgactgcaagtacaaacccactggcacagctccacgcgaaaacattcgtggagacctcgcaactctcgcggcgaggattgcaagtgagacacacattccaaccaccttcaactatggcaggatttacacagacactgaggtcgatgtgtacgtcaggatgaagcgcgcggaactctactgcccgcgacccgttctcacgcactacgaccacggtggcagggatcgctacagaactgcgatcaccaaacctgtcaaacagatgtgcagtttcgacctgttaaagctggctggagacgttgagtccaaccctgggccc

SEQ ID NO: 380 - DNA, 2289 bp, Foot-and-mouth disease virus
  CDS (1)..(2289)
  misc_feature (1)..(2289): P1_SAT1_KNP/196/91_wildtype
ggagcgggccagtcgtcccccgccactgggtcccagaaccagtctggcaacactggcagcatcatcaacaactactacatgcaacagtaccaaaattccatggacacccaactcggagacaacgccatctccggtgggtcaaatgagggttcgaccgacacaacgtcgacccacaccagcaacacccaaaacaacgattggttttcaaaattggctcaatcggccttctctggattggttggtgcgttgcttgccgacaagaagactgaggaaaccacactcctcgaggatcgcatcctcacgaccagtcacggcacaaccacctcgaccacacaaagttcagtgggcataacctacggttacgccgactcggaccgtttcctccccggcccaaacaccaacgggctggagacacgtgtggaacaagcagagaggtttttcaaacacaaattatttgattggacacttgaacaacgatttggaacaacacacgttttggaactgcccacagaccacaaaggcatctatggacaacttgttgactcccactcatacattcgcaatgggtgggacgttgaggtctccgcgaccgcaacgcagttcaacgggggctgcctcctggtagcgatggtgcccgaattgtgcaaactgtcggaaagagagaaataccaactcactctcttccctcatcaatttctcgacccaaggaccaacaccacggcacacatccaggtaccctacctgggcgtggatcgccacgaccaaggaacacgccacaaagcgtggaccctggttgtcatggtggtggcaccctacacaaacgatcagacgattggctcgaacaaagccgaggtgtacgtgaacattgctcccacaaacgtttacgtcgccggtgagaagcccgcaaaacagggcattctccccgtggccgtctccgttggctatggtggcttccaaaatacagatcccaaaacatcggaccccgtatacgggcacgtgtacaacccggctcgcaccggcctacctgggaggttcacaaacctcttggatgtggctgaagcgtgccctacactgcttgacttcaacggagttccgtacgtgaccacccaggcaaactctggatctaaagtgttaacttgttttgatttggcttttggtcacaaaaatttgaaaaatacatttatgtctggtcttgcccagtactacacccagtacagtggcacactcaacctgcacttcatgtacacaggcccaaccaacaacaaggctaagtacatggtggcctacatcccacctgggacacaccctctcccggaaacaccggagatggagtcccactgtcaccacgccgagtgggacacaggcctgaactcaaccttcacattcaccgtgccgtacgtgtcggctgccgacttcgcgtacacctactctgacgagcctgaacaggcttcggttcagggttgggtgggcgtataccaggtgactgacacacacgagaaggacggtgcagttgttgtgtccgtcagtgctggacccgacttcgagttcaggatgcccatcagcccctcgcgccagaccacatccgctggcgaaggagcggagcctgtcacgactgatgcttcccaacacggaggcgacagacggacaactcgtaggcatcacactgatgtgagcttcttgctcgaccggttcacactggttggtaaaacacaggacaacaaactgacactagacctgctccaaaccaaggaaaaagcactggttggcgcaatcctgcgcgcagccacgtactacttctctgacttggaggttgcgtgtgtgggtgacaacaaatgggtcggctggactcccaacggagctccagaacttgcggaagtgggcgacaacccagtcgtcttttccaaaggtagaaccacccgttttgcactgccctacaccgctccacacaggtgcttggcgacagcctacaacggtgactgcaagtacaaacccactggcacagctccacgcgaaaacattcgtggagacctcgcaactctcgcggcgaggattgcaagtgagacacacattccaaccaccttcaactatggcaggatttacacagacactgaggtcgacgtgtacgtcaggatgaagcgcgcggagctctactgcccgcgacccgttctcacgcactacgaccacggtggcagggatcgctacagaactgcgatcaccaaacctgtcaaacagatgtgcagtttcgacctgttaaagctggctggagacgttgagtccaaccctgggccc

SEQ ID NO: 381 - protein, 763 aa, Foot-and-mouth disease virus
GAGQSSPATGSQNQSGNTGSIINNYYMQQYQNSMDTQLGDNAISGGSNEGSTDTTSTHTSNTQNNDWFSKLAQSAFSGLVGALLADKKTEETTLLEDRILTTSHGTTTSTTQSSVGITYGYADSDRFLPGPNTNGLETRVEQAERFFKHKLFDWTLEQRFGTTHVLELPTDHKGIYGQLVDSHSYIRNGWDVEVSATATQFNGGCLLVAMVPELCKLSEREKYQLTLFPHQFLDPRTNTTAHIQVPYLGVDRHDQGTRHKAWTLVVMVVAPYTNDQTIGSNKAEVYVNIAPTNVYVAGEKPAKQGILPVAVSVGYGGFQNTDPKTSDPVYGHVYNPARTGLPGRFTNLLDVAEACPTLLDFNGVPYVTTQANSGSKVLTCFDLAFGHKNLKNTFMSGLAQYYTQYSGTLNLHFMYTGPTNNKAKYMVAYIPPGTHPLPETPEMESHCHHAEWDTGLNSTFTFTVPYVSAADFAYTYSDEPEQASVQGWVGVYQVTDTHEKDGAVVVSVSAGPDFEFRMPISPSRQTTSAGEGAEPVTTDASQHGGDRRTTRRHHTDVSFLLDRFTLVGKTQDNKLTLDLLQTKEKALVGAILRAATYYFSDLEVACVGDNKWVGWTPNGAPELAEVGDNPVVFSKGRTTRFALPYTAPHRCLATAYNGDCKYKPTGTAPRENIRGDLATLAARIASETHIPTTFNYGRIYTDTEVDVYVRMKRAELYCPRPVLTHYDHGGRDRYRTAITKPVKQMCSFDLLKLAGDVESNPGP

SEQ ID NO: 382 - DNA, 2277 bp, Artificial Sequence
  P1_SAT2_Egypt_2010_cut_sites_removed
ggggccgggcaatccagcccggctactggttcccaaaatcaatcaggcaatactggtagcattattaacaactactacatgcaacagtaccagaactcaatggacacacagcttggtgacaacgccattagcggtggttccaacgaggggtcaacggacaccacgtcaacacacacaaacaacacacagaacaatgactggttttccaaattggctcaatcagccatttcagggcttttcggtgctctgcttgcagacaagaaaacagaggagaccacactgctggaggacagaatcctgaccacacgtcacgggaccacgacctccaccacgcaaagttctgtgggagtgacatttggttatgctgatgctgattcgtttcgcccaggaccaaacacctctgggcttgagacgcgcgtgcaacaggcagaacgcttcttcaaggagaaactttttgactggaccagtgacaaacctttcggtacgctgtacgtgttggagttgcccaaagaccacaagggcatctacggtaaacttaccgactcctacacgtacatgcgtaacggttgggacgttcaggtcagcgcgaccagcacacagtttaacggcggatcactgctcgtggcaatggtcccagagttgtgcagtctaaaagccagagaagaatttcaactcactctctacccacaccagttcattaacccgcgcaccaacacaaccgcacacatacaggttccttacctgggtgtaaacagacacgaccagggtaagcgccaccaggcgtggtctctggttgtgatggtgctcacgcctcttaccaccgaggcgcagatgaacagcggcaccgtcgaggtgtacgccaacatcgcaccaacaaatgtggttgtggcgggtgaactgccgggtaagcagggcatcattccggtcgctgccgctgacgggtatggtggtttccagaacaccgacccgaaaacggctgaccccatttacgggcatgtgtacaacccgtccagaaacgactgccacgggcgatactccaatcttatggatgtcgccgaggcgtgtccaacactcctcaactttgatggcaagccctacgtcgtgaccaagaacaacggtgacaaggtgatggcacgcttcgatgtcgcctttacacacaaggtgcatgggaacacgtttctggcgggcttggccgactactacacacagtattcaggcagcctaaactaccacttcatgtacactggacccacacatcacaaggcaaagttcatggtggcatacgtgccccctggtgttgcagttgaccaactgcctagcacaccggaggatgctgcgcactgctaccatgcggaatgggacaccgggttgaactcttctttctcgttcgcagtgccttacatctccgctgcggacttttcttacacacacacagacacaccagcaatggccaccactaatggctgggtagttgtactacaggtcacagacacgcactctgcggaagctgccgttgtagtgtcagtcagcgcgggaccagatttggagttccgattccctatcgaccctgtgcgacagactacctcggcgggagaaggcgcagatgttgtcaccacggacccatcgacacacggtgggaatgttcaagagggacgacgcaaacacaccgacgttgcgttccttcttgatcgcagtacacacgttcacacaaataagacatcttttgttgtggacctcatggacacaagggagaaggcgctcgtaggcgcaatcctgcgagcatccacctactacttttgtgaccttgaaattgcatgtgtgggcgaccacacaagggtcttctggcagcccaacggggcaccacggactacccagctcggcgacaaccctatggtttttgccaagggcggcgtaacccgctttgccatcccgtttacggctccacacaggctgctatctactgtttacaacggcgagtgtgtgtacaccaaggccgccgctgccattcgtggtgatcgtgcggcacttgcggcaaagtacgctgacaccaaccacactttgccgccaaccttcaacttcgggtacgtgaccgttgacaaaccagttgacgtttactaccggatgaagagggctgagctgtactgcccacgcccactgctgccagcctacaaacacacagacagagacagattcgacgcgcccatcggcgtcgaaagacagaccctgaattttgacctgctgaaactggcaggagacgttgagtccaaccctgggccc

SEQ ID NO: 383 - DNA, 2277 bp, Foot-and-mouth disease virus
  CDS (1)..(2277)
  misc_feature (1)..(2277): P1_SAT2_Egypt_2010_wildtype
ggggccgggcaatccagcccggctactggatcccaaaatcaatcaggcaatactggtagcattattaacaactactacatgcaacagtaccagaactcaatggacacacagcttggtgacaacgccattagcggtggttccaacgaggggtcgacggacaccacgtcgacacacacaaacaacacacagaacaatgactggttttccaaattggctcaatcagccatttcagggcttttcggagctctgcttgcagacaagaaaacagaggagaccacactgctggaggacagaatcctgaccacgcgtcacgggaccacgacctccaccacgcaaagttctgtgggagtgacatttggttatgctgatgctgattcgtttcgcccaggacccaacacctctgggcttgagacgcgcgtgcaacaggcagaacgcttcttcaaggagaagctttttgactggaccagtgacaaacctttcggtacgctgtacgtgttggagttgcccaaagaccacaagggcatctacggtaaacttaccgactcctacacgtacatgcgtaacggttgggacgttcaggtcagcgcgaccagcacacagtttaacggcggatcactgctcgtggcaatggtcccagagttgtgcagtctaaaagccagagaagaatttcaactcactctctacccacaccagttcattaacccgcgcaccaacacaaccgcacacatacaggttccttacctgggtgtaaacagacacgaccagggtaagcgccaccaggcgtggtctctggttgtgatggtgctcacgcctcttaccaccgaggcgcagatgaacagcggcaccgtcgaggtgtacgccaacatcgcaccaacaaatgtggttgtggcgggtgaactgccgggtaagcagggcatcattccggtcgctgccgctgacgggtatggtggtttccagaacaccgacccgaaaacggctgaccccatttacgggcatgtgtacaacccgtccagaaacgactgccacgggcgatactccaatcttatggatgtcgccgaggcgtgtccaacactcctcaactttgatggcaagccctacgtcgtgaccaagaacaacggtgacaaggtgatggcacgcttcgacgtcgcctttacacacaaggtgcatgggaacacgtttctggcgggcttggccgactactacacacagtattcaggcagcctaaactaccacttcatgtacactggacccacacatcacaaggcaaagttcatggtggcatacgtgccccctggtgttgcagttgaccagctgcctagcacaccggaggatgctgcgcactgctaccatgcggaatgggacaccgggttgaattcttctttctcgttcgcagtgccttacatctccgctgcggacttttcttacacacacacagacacaccggccatggccaccaccaatggctgggtggttgtactgcaggtcaccgacacgcactctgcggaagctgccgttgtagtgtcagtcagcgcgggaccagatttggaattccgattccctatcgaccctgtgcgacagactacctcggcgggagaaggcgcagatgttgtcaccacggacccatcgacacacggtgggaatgttcaagagggtcgacgcaaacacaccgacgttgcgttccttcttgatcgcagtacacacgttcacacaaataagacatcttttgttgtggacctcatggacacaagggagaaggcgctcgtaggcgcaatcctgcgagcatccacctactacttttgtgaccttgaaattgcatgtgtgggcgaccacacaagggtcttctggcagcccaacggggcaccgcggactacccagctcggcgacaaccctatggtttttgccaagggcggcgtaacccgctttgccatcccgtttacggctccacacaggctgctgtctactgtttacaacggcgagtgtgtctacaccaaggccgccgctgccattcgtggtgatcgtgcggcacttgcggcaaagtacgctgacaccaaccacactttgccgccaaccttcaacttcgggtacgtgaccgttgacaaaccagtcgacgtttactaccggatgaagagggctgagctgtactgcccacgcccactgctgccagcctacaaacacacagacagagacagattcgacgcgcccatcggcgtcgaaagacagaccctgaattttgacctgctgaaactggcaggagacgttgagtccaaccctgggccc

SEQ ID NO: 384 - protein, 759 aa, Foot-and-mouth disease virus
GAGQSSPATGSQNQSGNTGSIINNYYMQQYQNSMDTQLGDNAISGGSNEGSTDTTSTHTNNTQNNDWFSKLAQSAISGLFGALLADKKTEETTLLEDRILTTRHGTTTSTTQSSVGVTFGYADADSFRPGPNTSGLETRVQQAERFFKEKLFDWTSDKPFGTLYVLELPKDHKGIYGKLTDSYTYMRNGWDVQVSATSTQFNGGSLLVAMVPELCSLKAREEFQLTLYPHQFINPRTNTTAHIQVPYLGVNRHDQGKRHQAWSLVVMVLTPLTTEAQMNSGTVEVYANIAPTNVVVAGELPGKQGIIPVAAADGYGGFQNTDPKTADPIYGHVYNPSRNDCHGRYSNLMDVAEACPTLLNFDGKPYVVTKNNGDKVMARFDVAFTHKVHGNTFLAGLADYYTQYSGSLNYHFMYTGPTHHKAKFMVAYVPPGVAVDQLPSTPEDAAHCYHAEWDTGLNSSFSFAVPYISAADFSYTHTDTPAMATTNGWVVVLQVTDTHSAEAAVVVSVSAGPDLEFRFPIDPVRQTTSAGEGADVVTTDPSTHGGNVQEGRRKHTDVAFLLDRSTHVHTNKTSFVVDLMDTREKALVGAILRASTYYFCDLEIACVGDHTRVFWQPNGAPRTTQLGDNPMVFAKGGVTRFAIPFTAPHRLLSTVYNGECVYTKAAAAIRGDRAALAAKYADTNHTLPPTFNFGYVTVDKPVDVYYRMKRAELYCPRPLLPAYKHTDRDRFDAPIGVERQTLNFDLLKLAGDVESNPGP

SEQ ID NO: 385 - DNA, 2277 bp, Artificial Sequence
  P1_SAT3_ZIM/05/91_cut_sites_removed
ggagcgggccagtcttcccctgccactgggtcgcagaaccaatctggcaacactggcagcatcataaacaactactacatgcagcagtaccaaaattcaatggacacccagcttggcgacaacgccatctcgggtggttcaaatgaaggcagcacggacaccacgtccacacacaccaacaacacccaaaacaatgattggttttcaaaattggcccaatccgccatttcaggactcttcggggctctgttggcggacaaaaagaccgaggaaacaaccttgcttgaggaccgaatcctcacaacacgccacaatactaccacatccaccacgcagagttcggtgggagtgacttacggttatgcgtccgctgatcggtttctcccaggaccgaacacaagtgggctggaaacgcgagtggaacaggccgagagattcttcaaggagagactcttcacttggaccgcttcgcagcagtacgcccacgttcacctgcttgaacttcccaccgaccacaagggcatctacggtgcaatggtggacaaccacgcttacatacgcaacggatgggacgtgcaggtctccgcgaccagcacgcagttcaatggtggtacattgctcgtggcaatggtcccagagttacacgcgctcgacacacgtagtgtttcacagctcacgctgtttccacaccaattcatcaacccacgcacaaacaccactgcccacattgtcgttccctacattggggtaaacaggcatgaccaggtaaaaatgcacaaggcctggacattggtggtcgcggttctcgcaccgctcacaacatcaaacatgggacaggacaacgttgaggtgtacgccaacatcgcaccaaccaacgtttttgttgctggcgagaagcctaccaaacaaggcatcttccccgtggcctgcaacgacggctacggtggctttcagaacactgatcccaagacctctgaccccatatacgggcttgtggcaaacccacctcgcaccgcttttccagggaggttcaccaacttccttgacgtggcggaggcatgcccgacctttctggacttcaacggaacaccttacgtcaagaccagacacaacagtgggagcaagatactcacccacatagatttggcttttgggcacaagagtttcaagaacacttatcttgctggtctcgcccagtattacgcccaatacagcggatctctcaacctgcacttcatgtacacgggtccaacgcaatcaaaggcacgctttatggttgcatacgtaccaccagggacggagcccgtaccatcaacacccgaggaagcggcgcactgctaccactcggaatgggacactggactgaactccaagttcacgttcacagtgccgtacatgtctgctgctgactatgcctacacctactgcgacgagcctgaacaggcctccgcacaagggtgggtaacactgtaccaaattactgacacacatgaccctgattcggctgtcctcatctcagttagcgcaggcgctgactttgaactcaggctgcccatcaaccccgttactcagacaacgagcgcgggggaaggcgcagacgtggtgacaacggacgttaccacacatggaggaacagttgacacaccaagaaggcagcacaccaacgtggagtttctgctggacagattcacacacattgggtcgatcaccgcctcaaagaccattgacctccttgagacaaaagaacacacgctggtgggcgcactcctgcgttcagctacgtactacttttgtgaccttgaggtcgcggtgcttggcaacgcgaagtgggttggatgggtgccgaatggctgcccacacaccgaccgcgtggaagacaacccagtcgttcacgccaaggggaatgttacccgctttgcactgccctacacagccccgcacggagtgcttgccacgacctacaacgggacttgcaagtattccaagacgcaaagtgttaaaccacgccgaggcgacatggctgtgctggcacaacgtgttgaaggtgaacaacaaagatgcaaacccacgacattcaacttcggtcgattgttgtgtgattcgggtgacgtgtactaccgaatgaagcgggccgagctttactgcccacgtccgctgatggtcaggtacactcacaccacagacagatacaaagttgcgcttgtgtcaccagctaagcaactgtgcaacttcgacctgttaaagttggctggagatgttgagtccaaccctgggccc

SEQ ID NO: 386 - DNA, 2277 bp, Foot-and-mouth disease virus
  CDS (1)..(2277)
  misc_feature (1)..(2277): P1_SAT3_ZIM/05/91_wildtype
ggagcgggccagtcttcccctgccacagggtcgcagaaccaatctggcaacactggcagcatcataaacaactactacatgcagcagtaccagaattcaatggacacccagcttggcgacaacgccatctcgggtggttcaaatgaaggcagcacggacaccacgtccacacacaccaacaacacccaaaacaatgattggttttcaaaattggcccaatccgccatttcaggactcttcggggctctgttggcggacaaaaagaccgaggaaacaaccttgctcgaggaccgaatcctcacaacacgccacaatactaccacatccaccacgcagagttcggtgggagtgacgtacggttacgcgtccgctgaccggtttctcccaggaccgaacacaagtgggctggaaacgcgagtggaacaggccgagagattcttcaaggagagactcttcacttggaccgcttcgcagcagtacgcccacgttcacctgcttgaacttcccaccgaccacaagggcatctacggtgccatggtggacaaccacgcgtacatacgcaacggatgggacgtgcaggtctccgcgaccagcacgcagttcaatggtggtacattgctcgtggcaatggtcccagagttacacgcgctcgacacgcgtagtgtttcacagctcacgctgtttccacaccaattcatcaacccacgcacaaacaccactgcccacattgtggttccctacattggggtaaacaggcatgaccaggtaaaaatgcacaaggcctggacattggtggtcgcggttctcgcaccgctcaccacatcaaacatgggacaggacaacgttgaggtgtacgccaacatcgcaccaaccaacgtttttgtggctggcgagaagcctaccaaacaaggcatcttccccgtggcctgcaacgacggctacggtggctttcagaacactgatcccaagacctctgaccccatatacgggctggtggcaaacccacctcgcaccgcttttcccgggaggttcaccaacttcctggacgtggcggaggcatgcccgacctttctggacttcaacggaacaccttacgtcaagaccagacacaacagtgggagcaagatactcacccacatagatttggcttttgggcacaagagtttcaagaacacttatcttgctggtctcgcccagtattacgcccaatacagtggatctctcaacctgcacttcatgtacacgggtcccacgcaatcaaaggcacgctttatggttgcatacgtaccacccgggacggagcccgtaccatcaacacccgaggaagcggcgcactgctaccactcggaatgggacactggactgaactccaagttcacgttcacagtgccgtacatgtctgcagctgactatgcctacacctactgcgacgagcctgaacaggcctccgcacaagggtgggtaacactgtaccaaattactgacacacatgaccctgattcggctgtcctcatctcagttagcgcaggcgctgactttgagctcaggctgcccatcaaccccgttactcagacaacgagcgcgggggaaggcgcagacgtggtgaccacggacgttaccacccatggaggaacagttgacacaccaagaaggcagcacaccaacgtggagtttctgctggacagattcacacacattgggtcgatcaccgcctcaaagaccattgacctcctcgagacaaaagaacacacgctggtgggcgcactcctgcgttcagctacgtactacttttgtgacctcgaggtcgcggtgcttggcaacgcgaagtgggttggatgggtgccgaatggctgcccacacaccgaccgcgtggaagacaacccagtcgttcacgccaaggggaatgttacccgctttgcactgccctacacagccccgcacggagtgcttgccacgacctacaacgggacttgcaagtattccaagacgcaaagtgttaaaccacgccgtggcgacatggctgtgctggcacaacgcgttgaaggtgaacaacaaagatgcaaacccacgacattcaacttcggtcgattgttgtgtgattcgggtgacgtgtactaccgaatgaagcgggccgagctttactgcccacgtccgctgatggtcaggtacactcacaccacagacagatacaaagttgcgcttgtgtcaccagctaagcaactgtgcaacttcgacctgttaaagttggctggagatgttgagtccaaccctgggccc

SEQ ID NO: 387 - protein, 759 aa, Foot-and-mouth disease virus
GAGQSSPATGSQNQSGNTGSIINNYYMQQYQNSMDTQLGDNAISGGSNEGSTDTTSTHTNNTQNNDWFSKLAQSAISGLFGALLADKKTEETTLLEDRILTTRHNTTTSTTQSSVGVTYGYASADRFLPGPNTSGLETRVEQAERFFKERLFTWTASQQYAHVHLLELPTDHKGIYGAMVDNHAYIRNGWDVQVSATSTQFNGGTLLVAMVPELHALDTRSVSQLTLFPHQFINPRTNTTAHIVVPYIGVNRHDQVKMHKAWTLVVAVLAPLTTSNMGQDNVEVYANIAPTNVFVAGEKPTKQGIFPVACNDGYGGFQNTDPKTSDPIYGLVANPPRTAFPGRFTNFLDVAEACPTFLDFNGTPYVKTRHNSGSKILTHIDLAFGHKSFKNTYLAGLAQYYAQYSGSLNLHFMYTGPTQSKARFMVAYVPPGTEPVPSTPEEAAHCYHSEWDTGLNSKFTFTVPYMSAADYAYTYCDEPEQASAQGWVTLYQITDTHDPDSAVLISVSAGADFELRLPINPVTQTTSAGEGADVVTTDVTTHGGTVDTPRRQHTNVEFLLDRFTHIGSITASKTIDLLETKEHTLVGALLRSATYYFCDLEVAVLGNAKWVGWVPNGCPHTDRVEDNPVVHAKGNVTRFALPYTAPHGVLATTYNGTCKYSKTQSVKPRRGDMAVLAQRVEGEQQRCKPTTFNFGRLLCDSGDVYYRMKRAELYCPRPLMVRYTHTTDRYKVALVSPAKQLCNFDLLKLAGDVESNPGP

SEQ ID NO: 388 - DNA, 6674 bp, Artificial Sequence
  pJJP_O1P1-3C(C163A)-GLuc(-1M)
tcaatattggccattagccatattattcattggttatatagcataaatcaatattggctattggccattgcatacgttgtatctatatcataatatgtacatttatattggctcatgtccaatatgaccgccatgttggcattgattattgactagttattaatagtaatcaattacggggtcattagttcatagcccatatatggagttccgcgttacataacttacggtaaatggcccgcctggctgaccgcccaacgacccccgcccattgacgtcaataatgacgtatgttcccatagtaacgccaatagggactttccattgacgtcaatgggtggagtatttacggtaaactgcccacttggcagtacatcaagtgtatcatatgccaagtccgccccctattgacgtcaatgacggtaaatggcccgcctggcattatgcccagtacatgaccttacgggactttcctacttggcagtacatctacgtattagtcatcgctattaccatggtgatgcggttttggcagtacaccaatgggcgtggatagcggtttgactcacggggatttccaagtctccaccccattgacgtcaatgggagtttgttttggcaccaaaatcaacgggactttccaaaatgtcgtaacaactgcgatcgcccgccccgttgacgcaaatgggcggtaggcgtgtacggtgggaggtctatataagcagagctcgtttagtgaaccgtcagatcactagaagctttattgcggtagtttatcacagttaaattgctaacgcagtcagtgcttctgacacaacagtctcgaagattaaacttaagtgactctattaaggtagccttgcagaagttggtcgtgaggcactgggcaggtaagtatcaaggttacaagacaggtttaaggagaccaatagaaactgggcttgtcgagacagagaagactcttgcgtttctgataggcacctattggtcttactgacatccactttgcctttctctccacagaatcgatattggatccgccgccaccatgggagccgggcaatccagcccggcaaccgggtcacagaaccaatcaggcaacactgggagcatcatcaacaattactacatgcagcagtaccaaaactctatggacacacaacttggtgacaacgctacaagcggaggctcaaacgaggggtccacggacacaacctccacccacacaaccaacactcagaacaacgactggttctcgaagctggctagctccgctttcagcggtcttttcggcgctcttctcgccgacaagaaaaccgaggagaccactcttcttgaggaccgcatcctcactactcgtaacggacacaccacctcgacaacccagtcgagcgtaggagtcacatacgggtatgcaacggctgaggatttcgtgagcgggccaaacacctctggtcttgagaccagggttgcccaggcagagcggttctttaaaacccacctgttcgactgggtcacaagtgacccgttcggacggtgccacctgctagaacttccaactgaccacaaaggtgtctatggcagcctgaccgactcgtatgcttatatgaggaacggctgggatgttgaagtcactgctgtgggaaatcagttcaatggaggatgcctgttggtggctatggtgccagaactttgctccatacagaagagggagctgtaccagctcacgctctttcctcaccagttcatcaaccctcggacgaacatgacagcacacatcactgtgccctttgttggcgtcaaccgttatgaccagtacaaggtacacaaaccttggaccctcgtggttatggttgtagcccccctgaccgtcaacagtgaaggtgccccgcaaatcaaggtgtatgccaacatcgcacctaccaacgtacacgtcgcgggtgaattcccttccaaagaggggatcttccctgtggcttgcagcgatggttatggcggtctggtgacaactgacccgaaaacggctgaccccgcttacgggaaagtgtttaaccccccccgcaacatgttgccggggcggttcaccaattttcttgacgtggctgaggcgtgccccacgtttctccacttcgagggtgacgtgccatacgtgaccacgaagacggattcagacagggtgctcgctcagttcgacttgtctttggcagcaaagcacatgtccaacaccttccttgcaggtctcgcccagtactacacacagtacagcggcaccatcaacctgcacttcatgttcacagggcctactgacgcgaaggcgcgttacatgattgcgtatgctcctcctggcatggaaccacctaaaacgccagaggcggctgcccactgcatccatgctgaatgggacacagggttgaactcaaaattcacattttcaatcccttacctttcggcggctgattacgcttacacagcgtctgacactgctgagaccacaaatgtacagggatgggtttgcctgtttcaaataacacacgggaaagctgacggcgacgcactggtcgttttggccagcgccggaaaggactttgagctgcgcctgccggtggatgctaggacccagactacctccgcgggcgagtcagcagaccccgtgaccgccaccgttgagaattacggtggcgagacacaggtccagaggcgccaacacacggacgtgtcatttatattagacagatttgtgaaagtgacaccaaaagaccaaattaatgtattggacctgatgcaaacccctgctcacactttggtgggagcactccttcgtactgccacttactatttcgctgacttagaggtggcagtgaagcacgagggaaacctcacctgggtgccgaacggggcgcctgaagcggcgttggacaacaccaccaacccaacagcttaccacaaggcaccactcacccgacttgcactgccttacacggcgccacaccgcgtgttggctactgtttacaacgggaacagcaagtatggtgacggcacggtggccaatgtgagaggtgatctgcaagtgttggcccagaaggcggcgagagcgctgcctacctccttcaactacggtgccattaaagctactcgggtgactgaactgctttaccgcatgaagagggctgagacatactgtccccggcctcttttggccattcacccggaccaggctagacacaagcagaagattgtggctccggtgaaacagcttctaaattttgacctgctcaaattggcgggagatgtggagtccaaccctgggcccagtggtgccccaccgaccgacttgcaaaagatggtcatgagcaacactaagcctgttgagctcatccttgacggtaagacggtggccatctgctgcgccaccggagtgtttggtactgcctacctcgtgcctcgtcaccttttcgcagaaaagtacgacaggatcatgttggacggcagggccatgacagacagtgactacagagtgtttgagtttgagattaaagtaaaaggacaggacatgctctcagacgctgcgctcatggtgctccaccgtggcaaccgtgtgagagacatcacgaaacactttcgtgatacagcaagaatgaagaaaggtacccccgttgtcggcgtgatcaacaacgccgacgttgggagactgattttctccggtgaggccctcacctacaaggacattgtagtgtgcatggatggagacaccatgccgggcctatttgcctacagagccgctaccaaggctggctacgctggaggagccgttcttgccaaggacggagctgacacatttatcgtcggcactcactccgcaggaggcaatggagtcgggtactgctcatgcgtatctaggtccatgctcttgaagatgaaggcacacattgaccccgaaccacaccacgaggaattccacaagcaaaagatcattgcaccagcaaagcagcttctgaattttgacctgctcaagttggccggagacgttgagtccaacccaggaccaggagtcaaagttctgtttgccctgatctgcatcgctgtggccgaggccaagcccaccgagaacaacgaagacttcaacatcgtggccgtggccagcaacttcgcgaccacggatctcgatgctgaccgagggaagttgcccggcaagaagctgccgctggaggtgctcaaagagatggaagccaatgcccggaaagctggctgcaccaggggctgtctgatctgcctgtcccacatcaaatgcacgcccaagatgaagaagttcatcccaggacgctgccacacctacgaaggcgacaaagagtccgcacagggcggcataggcgaggcgatcgttgacattcctgagattcctgggttcaaggacttggagccaatggagcagttcatcgcacaggtcgatctgtgtgtggactgcacaactggctgcctcaaagggcttgccaacgtgcagtgttctgacctgctcaagaagtggctgccgcaacgctgtgcgacctttgccagcaagatccagggccaggtggacaagatcaagggggccggtggtgactaatctagagatatcagacatgataagatacattgatgagtttggacaaaccacaacaagaatgcagtgaaaaaaatgctttatttgtgaaatttgtgatgctattgctttatttgtaaccattataagctgcaataaacaagttaacaacaacaattgcattcattttatgtttcaggttcagggggagatgtgggaggttttttaaagcaagtaaaacctctacaaatgtggtaaatccgataaggatcgtcgactggctgcagtcggggaaatgtgcgcggaacccctatttgtttatttttctaaatacattcaaatatgtatccgctctcgagacaataaccctgataaatgcttcaataatattgaaaaaggaagagtatgagtattcaacatttcagagtggcccttattcccttttttgcagcattttgccttcctgtttttgctcacccagaaacactggtgaaagtaaaagatgctgaagaccagttgggtgccagagtgggttacattgaactggacctcaacagtggtaaaatccttgagagttttagacctgaagaaagatttccaatgatgagcacttttaaagtactgctatgtggtgctgtattatccagaattgatgcagggcaagagcaacttggtagaagaatacactattctcagaatgacttggttgagtactcaccagtcacagaaaagcatcttacagatggcatgacagtaagagaattatgcagtgctgccataaccatgagtgataacacagctgccaacttacttctgacaaccattggtggacctaaagagctaactgcttttttgcacaacatgggggaccatgtaactagacttgataggtgggaacctgagctgaatgaagccattccaaatgatgagagggacaccacaatgcctgtagcaatggcaacaactttgaggaaactattaactggtgaactacttactctagcttccagacaacaattaatagactggatggaggcagataaagttgcaggaccacttctgaggtcagccttacctgctggctggtttattgctgataaatctggagcaggtgagagagggtctaggggtatcattgcagcactggggccagatggtaagccctccagaattgtagttatctacacaacagggagtcaggcaactatggatgaaagaaatagacagatagctgagataggtgcctcactgattaagcattggtgagcatgcgaccaagtttactcatatatactttagattgatttaaaacttcatttttaatttaaaaggatctaggtgaagatcctttttgataatctcatgaccaaaatcccttaacgtgagttttcgttccactgagcggttaaccccgtagaaaagatcaaaggatcttcttgagatcctttttttctgcgcgtaatctgctgcttgcaaacaaaaaaaccaccgctaccagcggtggtttgtttgccggatcaagagctaccaactctttttccgaaggtaactggcttcagcagagcgcagataccaaatactgtccttctagtgtagccgtagttaggccaccacttcaagaactctgtagcaccgcctacatacctcgctctgctaatcctgttaccagtggctgctgccagtggcgataagtcgtgtcttaccgggttggactcaagacgatagttaccggataaggcgcagcggtcgggctgaacggggggttcgtgcacacagcccagcttggagcgaacgacctacaccgaactgagatacctacagcgtgagctatgagaaagcgccacgcttcccgaagggagaaaggcggacaggtatccggtaagcggcagggtcggaacaggagagcgcacgagggagcttccagggggaaacgcctggtatctttatagtcctgtcgggtttcgccacctctgacttgagcgtcgatttttgtgatgctcgtcaggggggcggagcctatggaaaaacgccagcaacgcggcctttttacggttcctggccttttgctggccttccactgcaatggccggccagatct

SEQ ID NO: 389 - DNA, 6674 bp, Artificial Sequence
  pJJP_O1P1-3C(D123P)-GLuc(-1M)
tcaatattggccattagccatattattcattggttatatagcataaatcaatattggctattggccattgcatacgttgtatctatatcataatatgtacatttatattggctcatgtccaatatgaccgccatgttggcattgattattgactagttattaatagtaatcaattacggggtcattagttcatagcccatatatggagttccgcgttacataacttacggtaaatggcccgcctggctgaccgcccaacgacccccgcccattgacgtcaataatgacgtatgttcccatagtaacgccaatagggactttccattgacgtcaatgggtggagtatttacggtaaactgcccacttggcagtacatcaagtgtatcatatgccaagtccgccccctattgacgtcaatgacggtaaatggcccgcctggcattatgcccagtacatgaccttacgggactttcctacttggcagtacatctacgtattagtcatcgctattaccatggtgatgcggttttggcagtacaccaatgggcgtggatagcggtttgactcacggggatttccaagtctccaccccattgacgtcaatgggagtttgttttggcaccaaaatcaacgggactttccaaaatgtcgtaacaactgcgatcgcccgccccgttgacgcaaatgggcggtaggcgtgtacggtgggaggtctatataagcagagctcgtttagtgaaccgtcagatcactagaagctttattgcggtagtttatcacagttaaattgctaacgcagtcagtgcttctgacacaacagtctcgaagattaaacttaagtgactctattaaggtagccttgcagaagttggtcgtgaggcactgggcaggtaagtatcaaggttacaagacaggtttaaggagaccaatagaaactgggcttgtcgagacagagaagactcttgcgtttctgataggcacctattggtcttactgacatccactttgcctttctctccacagaatcgatattggatccgccgccaccatgggagccgggcaatccagcccggcaaccgggtcacagaaccaatcaggcaacactgggagcatcatcaacaattactacatgcagcagtaccaaaactctatggacacacaacttggtgacaacgctacaagcggaggctcaaacgaggggtccacggacacaacctccacccacacaaccaacactcagaacaacgactggttctcgaagctggctagctccgctttcagcggtcttttcggcgctcttctcgccgacaagaaaaccgaggagaccactcttcttgaggaccgcatcctcactactcgtaacggacacaccacctcgacaacccagtcgagcgtaggagtcacatacgggtatgcaacggctgaggatttcgtgagcgggccaaacacctctggtcttgagaccagggttgcccaggcagagcggttctttaaaacccacctgttcgactgggtcacaagtgacccgttcggacggtgccacctgctagaacttccaactgaccacaaaggtgtctatggcagcctgaccgactcgtatgcttatatgaggaacggctgggatgttgaagtcactgctgtgggaaatcagttcaatggaggatgcctgttggtggctatggtgccagaactttgctccatacagaagagggagctgtaccagctcacgctctttcctcaccagttcatcaaccctcggacgaacatgacagcacacatcactgtgccctttgttggcgtcaaccgttatgaccagtacaaggtacacaaaccttggaccctcgtggttatggttgtagcccccctgaccgtcaacagtgaaggtgccccgcaaatcaaggtgtatgccaacatcgcacctaccaacgtacacgtcgcgggtgaattcccttccaaagaggggatcttccctgtggcttgcagcgatggttatggcggtctggtgacaactgacccgaaaacggctgaccccgcttacgggaaagtgtttaaccccccccgcaacatgttgccggggcggttcaccaattttcttgacgtggctgaggcgtgccccacgtttctccacttcgagggtgacgtgccatacgtgaccacgaagacggattcagacagggtgctcgctcagttcgacttgtctttggcagcaaagcacatgtccaacaccttccttgcaggtctcgcccagtactacacacagtacagcggcaccatcaacctgcacttcatgttcacagggcctactgacgcgaaggcgcgttacatgattgcgtatgctcctcctggcatggaaccacctaaaacgccagaggcggctgcccactgcatccatgctgaatgggacacagggttgaactcaaaattcacattttcaatcccttacctttcggcggctgattacgcttacacagcgtctgacactgctgagaccacaaatgtacagggatgggtttgcctgtttcaaataacacacgggaaagctgacggcgacgcactggtcgttttggccagcgccggaaaggactttgagctgcgcctgccggtggatgctaggacccagactacctccgcgggcgagtcagcagaccccgtgaccgccaccgttgagaattacggtggcgagacacaggtccagaggcgccaacacacggacgtgtcatttatattagacagatttgtgaaagtgacaccaaaagaccaaattaatgtattggacctgatgcaaacccctgctcacactttggtgggagcactccttcgtactgccacttactatttcgctgacttagaggtggcagtgaagcacgagggaaacctcacctgggtgccgaacggggcgcctgaagcggcgttggacaacaccaccaacccaacagcttaccacaaggcaccactcacccgacttgcactgccttacacggcgccacaccgcgtgttggctactgtttacaacgggaacagcaagtatggtgacggcacggtggccaatgtgagaggtgatctgcaagtgttggcccagaaggcggcgagagcgctgcctacctccttcaactacggtgccattaaagctactcgggtgactgaactgctttaccgcatgaagagggctgagacatactgtccccggcctcttttggccattcacccggaccaggctagacacaagcagaagattgtggctccggtgaaacagcttctaaattttgacctgctcaaattggcgggagatgtggagtccaaccctgggcccagtggtgccccaccgaccgacttgcaaaagatggtcatgagcaacactaagcctgttgagctcatccttgacggtaagacggtggccatctgctgcgccaccggagtgtttggtactgcctacctcgtgcctcgtcaccttttcgcagaaaagtacgacaggatcatgttggacggcagggccatgacagacagtgactacagagtgtttgagtttgagattaaagtaaaaggacaggacatgctctcagacgctgcgctcatggtgctccaccgtggcaaccgtgtgagagacatcacgaaacactttcgtgatacagcaagaatgaagaaaggtacccccgttgtcggcgtgatcaacaacgcccccgttgggagactgattttctccggtgaggccctcacctacaaggacattgtagtgtgcatggatggagacaccatgccgggcctatttgcctacagagccgctaccaaggctggctactgtggaggagccgttcttgccaaggacggagctgacacatttatcgtcggcactcactccgcaggaggcaatggagtcgggtactgctcatgcgtatctaggtccatgctcttgaagatgaaggcacacattgaccccgaaccacaccacgaggaattccacaagcaaaagatcattgcaccagcaaagcagcttctgaattttgacctgctcaagttggccggagacgttgagtccaacccaggaccaggagtcaaagttctgtttgccctgatctgcatcgctgtggccgaggccaagcccaccgagaacaacgaagacttcaacatcgtggccgtggccagcaacttcgcgaccacggatctcgatgctgaccgagggaagttgcccggcaagaagctgccgctggaggtgctcaaagagatggaagccaatgcccggaaagctggctgcaccaggggctgtctgatctgcctgtcccacatcaaatgcacgcccaagatgaagaagttcatcccaggacgctgccacacctacgaaggcgacaaagagtccgcacagggcggcataggcgaggcgatcgttgacattcctgagattcctgggttcaaggacttggagccaatggagcagttcatcgcacaggtcgatctgtgtgtggactgcacaactggctgcctcaaagggcttgccaacgtgcagtgttctgacctgctcaagaagtggctgccgcaacgctgtgcgacctttgccagcaagatccagggccaggtggacaagatcaagggggccggtggtgactaatctagagatatcagacatgataagatacattgatgagtttggacaaaccacaacaagaatgcagtgaaaaaaatgctttatttgtgaaatttgtgatgctattgctttatttgtaaccattataagctgcaataaacaagttaacaacaacaattgcattcattttatgtttcaggttcagggggagatgtgggaggttttttaaagcaagtaaaacctctacaaatgtggtaaatccgataaggatcgtcgactggctgcagtcggggaaatgtgcgcggaacccctatttgtttatttttctaaatacattcaaatatgtatccgctctcgagacaataaccctgataaatgcttcaataatattgaaaaaggaagagtatgagtattcaacatttcagagtggcccttattcccttttttgcagcattttgccttcctgtttttgctcacccagaaacactggtgaaagtaaaagatgctgaagaccagttgggtgccagagtgggttacattgaactggacctcaacagtggtaaaatccttgagagttttagacctgaagaaagatttccaatgatgagcacttttaaagtactgctatgtggtgctgtattatccagaattgatgcagggcaagagcaacttggtagaagaatacactattctcagaatgacttggttgagtactcaccagtcacagaaaagcatcttacagatggcatgacagtaagagaattatgcagtgctgccataaccatgagtgataacacagctgccaacttacttctgacaaccattggtggacctaaagagctaactgcttttttgcacaacatgggggaccatgtaactagacttgataggtgggaacctgagctgaatgaagccattccaaatgatgagagggacaccacaatgcctgtagcaatggcaacaactttgaggaaactattaactggtgaactacttactctagcttccagacaacaattaatagactggatggaggcagataaagttgcaggaccacttctgaggtcagccttacctgctggctggtttattgctgataaatctggagcaggtgagagagggtctaggggtatcattgcagcactggggccagatggtaagccctccagaattgtagttatctacacaacagggagtcaggcaactatggatgaaagaaatagacagatagctgagataggtgcctcactgattaagcattggtgagcatgcgaccaagtttactcatatatactttagattgatttaaaacttcatttttaatttaaaaggatctaggtgaagatcctttttgataatctcatgaccaaaatcccttaacgtgagttttcgttccactgagcggttaaccccgtagaaaagatcaaaggatcttcttgagatcctttttttctgcgcgtaatctgctgcttgcaaacaaaaaaaccaccgctaccagcggtggtttgtttgccggatcaagagctaccaactctttttccgaaggtaactggcttcagcagagcgcagataccaaatactgtccttctagtgtagccgtagttaggccaccacttcaagaactctgtagcaccgcctacatacctcgctctgctaatcctgttaccagtggctgctgccagtggcgataagtcgtgtcttaccgggttggactcaagacgatagttaccggataaggcgcagcggtcgggctgaacggggggttcgtgcacacagcccagcttggagcgaacgacctacaccgaactgagatacctacagcgtgagctatgagaaagcgccacgcttcccgaagggagaaaggcggacaggtatccggtaagcggcagggtcggaacaggagagcgcacgagggagcttccagggggaaacgcctggtatctttatagtcctgtcgggtttcgccacctctgacttgagcgtcgatttttgtgatgctcgtcaggggggcggagcctatggaaaaacgccagcaacgcggcctttttacggttcctggccttttgctggccttccactgcaatggccggccagatct

SEQ ID NO: 390 - DNA, 6674 bp, Artificial Sequence
  pJJP_O1P1-3C(G125P)-GLuc(-1M)
tcaatattggccattagccatattattcattggttatatagcataaatcaatattggctattggccattgcatacgttgtatctatatcataatatgtacatttatattggctcatgtccaatatgaccgccatgttggcattgattattgactagttattaatagtaatcaattacggggtcattagttcatagcccatatatggagttccgcgttacataacttacggtaaatggcccgcctggctgaccgcccaacgacccccgcccattgacgtcaataatgacgtatgttcccatagtaacgccaatagggactttccattgacgtcaatgggtggagtatttacggtaaactgcccacttggcagtacatcaagtgtatcatatgccaagtccgccccctattgacgtcaatgacggtaaatggcccgcctggcattatgcccagtacatgaccttacgggactttcctacttggcagtacatctacgtattagtcatcgctattaccatggtgatgcggttttggcagtacaccaatgggcgtggatagcggtttgactcacggggatttccaagtctccaccccattgacgtcaatgggagtttgttttggcaccaaaatcaacgggactttccaaaatgtcgtaacaactgcgatcgcccgccccgttgacgcaaatgggcggtaggcgtgtacggtgggaggtctatataagcagagctcgtttagtgaaccgtcagatcactagaagctttattgcggtagtttatcacagttaaattgctaacgcagtcagtgcttctgacacaacagtctcgaagattaaacttaagtgactctattaaggtagccttgcagaagttggtcgtgaggcactgggcaggtaagtatcaaggttacaagacaggtttaaggagaccaatagaaactgggcttgtcgagacagagaagactcttgcgtttctgataggcacctattggtcttactgacatccactttgcctttctctccacagaatcgatattggatccgccgccaccatgggagccgggcaatccagcccggcaaccgggtcacagaaccaatcaggcaacactgggagcatcatcaacaattactacatgcagcagtaccaaaactctatggacacacaacttggtgacaacgctacaagcggaggctcaaacgaggggtccacggacacaacctccacccacacaaccaacactcagaacaacgactggttctcgaagctggctagctccgctttcagcggtcttttcggcgctcttctcgccgacaagaaaaccgaggagaccactcttcttgaggaccgcatcctcactactcgtaacggacacaccacctcgacaacccagtcgagcgtaggagtcacatacgggtatgcaacggctgaggatttcgtgagcgggccaaacacctctggtcttgagaccagggttgcccaggcagagcggttctttaaaacccacctgttcgactgggtcacaagtgacccgttcggacggtgccacctgctagaacttccaactgaccacaaaggtgtctatggcagcctgaccgactcgtatgcttatatgaggaacggctgggatgttgaagtcactgctgtgggaaatcagttcaatggaggatgcctgttggtggctatggtgccagaactttgctccatacagaagagggagctgtaccagctcacgctctttcctcaccagttcatcaaccctcggacgaacatgacagcacacatcactgtgccctttgttggcgtcaaccgttatgaccagtacaaggtacacaaaccttggaccctcgtggttatggttgtagcccccctgaccgtcaacagtgaaggtgccccgcaaatcaaggtgtatgccaacatcgcacctaccaacgtacacgtcgcgggtgaattcccttccaaagaggggatcttccctgtggcttgcagcgatggttatggcggtctggtgacaactgacccgaaaacggctgaccccgcttacgggaaagtgtttaaccccccccgcaacatgttgccggggcggttcaccaattttcttgacgtggctgaggcgtgccccacgtttctccacttcgagggtgacgtgccatacgtgaccacgaagacggattcagacagggtgctcgctcagttcgacttgtctttggcagcaaagcacatgtccaacaccttccttgcaggtctcgcccagtactacacacagtacagcggcaccatcaacctgcacttcatgttcacagggcctactgacgcgaaggcgcgttacatgattgcgtatgctcctcctggcatggaaccacctaaaacgccagaggcggctgcccactgcatccatgctgaatgggacacagggttgaactcaaaattcacattttcaatcccttacctttcggcggctgattacgcttacacagcgtctgacactgctgagaccacaaatgtacagggatgggtttgcctgtttcaaataacacacgggaaagctgacggcgacgcactggtcgttttggccagcgccggaaaggactttgagctgcgcctgccggtggatgctaggacccagactacctccgcgggcgagtcagcagaccccgtgaccgccaccgttgagaattacggtggcgagacacaggtccagaggcgccaacacacggacgtgtcatttatattagacagatttgtgaaagtgacaccaaaagaccaaattaatgtattggacctgatgcaaacccctgctcacactttggtgggagcactccttcgtactgccacttactatttcgctgacttagaggtggcagtgaagcacgagggaaacctcacctgggtgccgaacggggcgcctgaagcggcgttggacaacaccaccaacccaacagcttaccacaaggcaccactcacccgacttgcactgccttacacggcgccacaccgcgtgttggctactgtttacaacgggaacagcaagtatggtgacggcacggtggccaatgtgagaggtgatctgcaagtgttggcccagaaggcggcgagagcgctgcctacctccttcaactacggtgccattaaagctactcgggtgactgaactgctttaccgcatgaagagggctgagacatactgtccccggcctcttttggccattcacccggaccaggctagacacaagcagaagattgtggctccggtgaaacagcttctaaattttgacctgctcaaattggcgggagatgtggagtccaaccctgggcccagtggtgccccaccgaccgacttgcaaaagatggtcatgagcaacactaagcctgttgagctcatccttgacggtaagacggtggccatctgctgcgccaccggagtgtttggtactgcctacctcgtgcctcgtcaccttttcgcagaaaagtacgacaggatcatgttggacggcagggccatgacagacagtgactacagagtgtttgagtttgagattaaagtaaaaggacaggacatgctctcagacgctgcgctcatggtgctccaccgtggcaaccgtgtgagagacatcacgaaacactttcgtgatacagcaagaatgaagaaaggtacccccgttgtcggcgtgatcaacaacgccgacgttccgagactgattttctccggtgaggccctcacctacaaggacattgtagtgtgcatggatggagacaccatgccgggcctatttgcctacagagccgctaccaaggctggctactgtggaggagccgttcttgccaaggacggagctgacacatttatcgtcggcactcactccgcaggaggcaatggagtcgggtactgctcatgcgtatctaggtccatgctcttgaagatgaaggcacacattgaccccgaaccacaccacgaggaattccacaagcaaaagatcattgcaccagcaaagcagcttctgaattttgacctgctcaagttggccggagacgttgagtccaacccaggaccaggagtcaaagttctgtttgccctgatctgcatcgctgtggccgaggccaagcccaccgagaacaacgaagacttcaacatcgtggccgtggccagcaacttcgcgaccacggatctcgatgctgaccgagggaagttgcccggcaagaagctgccgctggaggtgctcaaagagatggaagccaatgcccggaaagctggctgcaccaggggctgtctgatctgcctgtcccacatcaaatgcacgcccaagatgaagaagttcatcccaggacgctgccacacctacgaaggcgacaaagagtccgcacagggcggcataggcgaggcgatcgttgacattcctgagattcctgggttcaaggacttggagccaatggagcagttcatcgcacaggtcgatctgtgtgtggactgcacaactggctgcctcaaagggcttgccaacgtgcagtgttctgacctgctcaagaagtggctgccgcaacgctgtgcgacctttgccagcaagatccagggccaggtggacaagatcaagggggccggtggtgactaatctagagatatcagacatgataagatacattgatgagtttggacaaaccacaacaagaatgcagtgaaaaaaatgctttatttgtgaaatttgtgatgctattgctttatttgtaaccattataagctgcaataaacaagttaacaacaacaattgcattcattttatgtttcaggttcagggggagatgtgggaggttttttaaagcaagtaaaacctctacaaatgtggtaaatccgataaggatcgtcgactggctgcagtcggggaaatgtgcgcggaacccctatttgtttatttttctaaatacattcaaatatgtatccgctctcgagacaataaccctgataaatgcttcaataatattgaaaaaggaagagtatgagtattcaacatttcagagtggcccttattcccttttttgcagcattttgccttcctgtttttgctcacccagaaacactggtgaaagtaaaagatgctgaagaccagttgggtgccagagtgggttacattgaactggacctcaacagtggtaaaatccttgagagttttagacctgaagaaagatttccaatgatgagcacttttaaagtactgctatgtggtgctgtattatccagaattgatgcagggcaagagcaacttggtagaagaatacactattctcagaatgacttggttgagtactcaccagtcacagaaaagcatcttacagatggcatgacagtaagagaattatgcagtgctgccataaccatgagtgataacacagctgccaacttacttctgacaaccattggtggacctaaagagctaactgcttttttgcacaacatgggggaccatgtaactagacttgataggtgggaacctgagctgaatgaagccattccaaatgatgagagggacaccacaatgcctgtagcaatggcaacaactttgaggaaactattaactggtgaactacttactctagcttccagacaacaattaatagactggatggaggcagataaagttgcaggaccacttctgaggtcagccttacctgctggctggtttattgctgataaatctggagcaggtgagagagggtctaggggtatcattgcagcactggggccagatggtaagccctccagaattgtagttatctacacaacagggagtcaggcaactatggatgaaagaaatagacagatagctgagataggtgcctcactgattaagcattggtgagcatgcgaccaagtttactcatatatactttagattgatttaaaacttcatttttaatttaaaaggatctaggtgaagatcctttttgataatctcatgaccaaaatcccttaacgtgagttttcgttccactgagcggttaaccccgtagaaaagatcaaaggatcttcttgagatcctttttttctgcgcgtaatctgctgcttgcaaacaaaaaaaccaccgctaccagcggtggtttgtttgccggatcaagagctaccaactctttttccgaaggtaactggcttcagcagagcgcagataccaaatactgtccttctagtgtagccgtagttaggccaccacttcaagaactctgtagcaccgcctacatacctcgctctgctaatcctgttaccagtggctgctgccagtggcgataagtcgtgtcttaccgggttggactcaagacgatagttaccggataaggcgcagcggtcgggctgaacggggggttcgtgcacacagcccagcttggagcgaacgacctacaccgaactgagatacctacagcgtgagctatgagaaagcgccacgcttcccgaagggagaaaggcggacaggtatccggtaagcggcagggtcggaacaggagagcgcacgagggagcttccagggggaaacgcctggtatctttatagtcctgtcgggtttcgccacctctgacttgagcgtcgatttttgtgatgctcgtcaggggggcggagcctatggaaaaacgccagcaacgcggcctttttacggttcctggccttttgctggccttccactgcaatggccggccagatct

SEQ ID NO: 391 - DNA, 6674 bp, Artificial Sequence
  pJJP_O1P1-3C(I128P)-GLuc(-1M)
tcaatattggccattagccatattattcattggttatatagcataaatcaatattggctattggccattgcatacgttgtatctatatcataatatgtacatttatattggctcatgtccaatatgaccgccatgttggcattgattattgactagttattaatagtaatcaattacggggtcattagttcatagcccatatatggagttccgcgttacataacttacggtaaatggcccgcctggctgaccgcccaacgacccccgcccattgacgtcaataatgacgtatgttcccatagtaacgccaatagggactttccattgacgtcaatgggtggagtatttacggtaaactgcccacttggcagtacatcaagtgtatcatatgccaagtccgccccctattgacgtcaatgacggtaaatggcccgcctggcattatgcccagtacatgaccttacgggactttcctacttggcagtacatctacgtattagtcatcgctattaccatggtgatgcggttttggcagtacaccaatgggcgtggatagcggtttgactcacggggatttccaagtctccaccccattgacgtcaatgggagtttgttttggcaccaaaatcaacgggactttccaaaatgtcgtaacaactgcgatcgcccgccccgttgacgcaaatgggcggtaggcgtgtacggtgggaggtctatataagcagagctcgtttagtgaaccgtcagatcactagaagctttattgcggtagtttatcacagttaaattgctaacgcagtcagtgcttctgacacaacagtctcgaagattaaacttaagtgactctattaaggtagccttgcagaagttggtcgtgaggcactgggcaggtaagtatcaaggttacaagacaggtttaaggagaccaatagaaactgggcttgtcgagacagagaagactcttgcgtttctgataggcacctattggtcttactgacatccactttgcctttctctccacagaatcgatattggatccgccgccaccatgggagccgggcaatccagcccggcaaccgggtcacagaaccaatcaggcaacactgggagcatcatcaacaattactacatgcagcagtaccaaaactctatggacacacaacttggtgacaacgctacaagcggaggctcaaacgaggggtccacggacacaacctccacccacacaaccaacactcagaacaacgactggttctcgaagctggctagctccgctttcagcggtcttttcggcgctcttctcgccgacaagaaaaccgaggagaccactcttcttgaggaccgcatcctcactactcgtaacggacacaccacctcgacaacccagtcgagcgtaggagtcacatacgggtatgcaacggctgaggatttcgtgagcgggccaaacacctctggtcttgagaccagggttgcccaggcagagcggttctttaaaacccacctgttcgactgggtcacaagtgacccgttcggacggtgccacctgctagaacttccaactgaccacaaaggtgtctatggcagcctgaccgactcgtatgcttatatgaggaacggctgggatgttgaagtcactgctgtgggaaatcagttcaatggaggatgcctgttggtggctatggtgccagaactttgctccatacagaagagggagctgtaccagctcacgctctttcctcaccagttcatcaaccctcggacgaacatgacagcacacatcactgtgccctttgttggcgtcaaccgttatgaccagtacaaggtacacaaaccttggaccctcgtggttatggttgtagcccccctgaccgtcaacagtgaaggtgccccgcaaatcaaggtgtatgccaacatcgcacctaccaacgtacacgtcgcgggtgaattcccttccaaagaggggatcttccctgtggcttgcagcgatggttatggcggtctggtgacaactgacccgaaaacggctgaccccgcttacgggaaagtgtttaaccccccccgcaacatgttgccggggcggttcaccaattttcttgacgtggctgaggcgtgccccacgtttctccacttcgagggtgacgtgccatacgtgaccacgaagacggattcagacagggtgctcgctcagttcgacttgtctttggcagcaaagcacatgtccaacaccttccttgcaggtctcgcccagtactacacacagtacagcggcaccatcaacctgcacttcatgttcacagggcctactgacgcgaaggcgcgttacatgattgcgtatgctcctcctggcatggaaccacctaaaacgccagaggcggctgcccactgcatccatgctgaatgggacacagggttgaactcaaaattcacattttcaatcccttacctttcggcggctgattacgcttacacagcgtctgacactgctgagaccacaaatgtacagggatgggtttgcctgtttcaaataacacacgggaaagctgacggcgacgcactggtcgttttggccagcgccggaaaggactttgagctgcgcctgccggtggatgctaggacccagactacctccgcgggcgagtcagcagaccccgtgaccgccaccgttgagaattacggtggcgagacacaggtccagaggcgccaacacacggacgtgtcatttatattagacagatttgtgaaagtgacaccaaaagaccaaattaatgtattggacctgatgcaaacccctgctcacactttggtgggagcactccttcgtactgccacttactatttcgctgacttagaggtggcagtgaagcacgagggaaacctcacctgggtgccgaacggggcgcctgaagcggcgttggacaacaccaccaacccaacagcttaccacaaggcaccactcacccgacttgcactgccttacacggcgccacaccgcgtgttggctactgtttacaacgggaacagcaagtatggtgacggcacggtggccaatgtgagaggtgatctgcaagtgttggcccagaaggcggcgagagcgctgcctacctccttcaactacggtgccattaaagctactcgggtgactgaactgctttaccgcatgaagagggctgagacatactgtccccggcctcttttggccattcacccggaccaggctagacacaagcagaagattgtggctccggtgaaacagcttctaaattttgacctgctcaaattggcgggagatgtggagtccaaccctgggcccagtggtgccccaccgaccgacttgcaaaagatggtcatgagcaacactaagcctgttgagctcatccttgacggtaagacggtggccatctgctgcgccaccggagtgtttggtactgcctacctcgtgcctcgtcaccttttcgcagaaaagtacgacaggatcatgttggacggcagggccatgacagacagtgactacagagtgtttgagtttgagattaaagtaaaaggacaggacatgctctcagacgctgcgctcatggtgctccaccgtggcaaccgtgtgagagacatcacgaaacactttcgtgatacagcaagaatgaagaaaggtacccccgttgtcggcgtgatcaacaacgccgacgttgggagactgcctttctccggtgaggccctcacctacaaggacattgtagtgtgcatggatggagacaccatgccgggcctatttgcctacagagccgctaccaaggctggctactgtggaggagccgttcttgccaaggacggagctgacacatttatcgtcggcactcactccgcaggaggcaatggagtcgggtactgctcatgcgtatctaggtccatgctcttgaagatgaaggcacacattgaccccgaaccacaccacgaggaattccacaagcaaaagatcattgcaccagcaaagcagcttctgaattttgacctgctcaagttggccggagacgttgagtccaacccaggaccaggagtcaaagttctgtttgccctgatctgcatcgctgtggccgaggccaagcccaccgagaacaacgaagacttcaacatcgtggccgtggccagcaacttcgcgaccacggatctcgatgctgaccgagggaagttgcccggcaagaagctgccgctggaggtgctcaaagagatggaagccaatgcccggaaagctggctgcaccaggggctgtctgatctgcctgtcccacatcaaatgcacgcccaagatgaagaagttcatcccaggacgctgccacacctacgaaggcgacaaagagtccgcacagggcggcataggcgaggcgatcgttgacattcctgagattcctgggttcaaggacttggagccaatggagcagttcatcgcacaggtcgatctgtgtgtggactgcacaactggctgcctcaaagggcttgccaacgtgcagtgttctgacctgctcaagaagtggctgccgcaacgctgtgcgacctttgccagcaagatccagggccaggtggacaagatcaagggggccggtggtgactaatctagagatatcagacatgataagatacattgatgagtttggacaaaccacaacaagaatgcagtgaaaaaaatgctttatttgtgaaatttgtgatgctattgctttatttgtaaccattataagctgcaataaacaagttaacaacaacaattgcattcattttatgtttcaggttcagggggagatgtgggaggttttttaaagcaagtaaaacctctacaaatgtggtaaatccgataaggatcgtcgactggctgcagtcggggaaatgtgcgcggaacccctatttgtttatttttctaaatacattcaaatatgtatccgctctcgagacaataaccctgataaatgcttcaataatattgaaaaaggaagagtatgagtattcaacatttcagagtggcccttattcccttttttgcagcattttgccttcctgtttttgctcacccagaaacactggtgaaagtaaaagatgctgaagaccagttgggtgccagagtgggttacattgaactggacctcaacagtggtaaaatccttgagagttttagacctgaagaaagatttccaatgatgagcacttttaaagtactgctatgtggtgctgtattatccagaattgatgcagggcaagagcaacttggtagaagaatacactattctcagaatgacttggttgagtactcaccagtcacagaaaagcatcttacagatggcatgacagtaagagaattatgcagtgctgccataaccatgagtgataacacagctgccaacttacttctgacaaccattggtggacctaaagagctaactgcttttttgcacaacatgggggaccatgtaactagacttgataggtgggaacctgagctgaatgaagccattccaaatgatgagagggacaccacaatgcctgtagcaatggcaacaactttgaggaaactattaactggtgaactacttactctagcttccagacaacaattaatagactggatggaggcagataaagttgcaggaccacttctgaggtcagccttacctgctggctggtttattgctgataaatctggagcaggtgagagagggtctaggggtatcattgcagcactggggccagatggtaagccctccagaattgtagttatctacacaacagggagtcaggcaactatggatgaaagaaatagacagatagctgagataggtgcctcactgattaagcattggtgagcatgcgaccaagtttactcatatatactttagattgatttaaaacttcatttttaatttaaaaggatctaggtgaagatcctttttgataatctcatgaccaaaatcccttaacgtgagttttcgttccactgagcggttaaccccgtagaaaagatcaaaggatcttcttgagatcctttttttctgcgcgtaatctgctgcttgcaaacaaaaaaaccaccgctaccagcggtggtttgtttgccggatcaagagctaccaactctttttccgaaggtaactggcttcagcagagcgcagataccaaatactgtccttctagtgtagccgtagttaggccaccacttcaagaactctgtagcaccgcctacatacctcgctctgctaatcctgttaccagtggctgctgccagtggcgataagtcgtgtcttaccgggttggactcaagacgatagttaccggataaggcgcagcggtcgggctgaacggggggttcgtgcacacagcccagcttggagcgaacgacctacaccgaactgagatacctacagcgtgagctatgagaaagcgccacgcttcccgaagggagaaaggcggacaggtatccggtaagcggcagggtcggaacaggagagcgcacgagggagcttccagggggaaacgcctggtatctttatagtcctgtcgggtttcgccacctctgacttgagcgtcgatttttgtgatgctcgtcaggggggcggagcctatggaaaaacgccagcaacgcggcctttttacggttcctggccttttgctggccttccactgcaatggccggccagatct

SEQ ID NO: 392 - DNA, 6674 bp, Artificial Sequence
  pJJP_O1P1-3C(I22P)-GLuc(-1M)
tcaatattggccattagccatattattcattggttatatagcataaatcaatattggctattggccattgcatacgttgtatctatatcataatatgtacatttatattggctcatgtccaatatgaccgccatgttggcattgattattgactagttattaatagtaatcaattacggggtcattagttcatagcccatatatggagttccgcgttacataacttacggtaaatggcccgcctggctgaccgcccaacgacccccgcccattgacgtcaataatgacgtatgttcccatagtaacgccaatagggactttccattgacgtcaatgggtggagtatttacggtaaactgcccacttggcagtacatcaagtgtatcatatgccaagtccgccccctattgacgtcaatgacggtaaatggcccgcctggcattatgcccagtacatgaccttacgggactttcctacttggcagtacatctacgtattagtcatcgctattaccatggtgatgcggttttggcagtacaccaatgggcgtggatagcggtttgactcacggggatttccaagtctccaccccattgacgtcaatgggagtttgttttggcaccaaaatcaacgggactttccaaaatgtcgtaacaactgcgatcgcccgccccgttgacgcaaatgggcggtaggcgtgtacggtgggaggtctatataagcagagctcgtttagtgaaccgtcagatcactagaagctttattgcggtagtttatcacagttaaattgctaacgcagtcagtgcttctgacacaacagtctcgaagattaaacttaagtgactctattaaggtagccttgcagaagttggtcgtgaggcactgggcaggtaagtatcaaggttacaagacaggtttaaggagaccaatagaaactgggcttgtcgagacagagaagactcttgcgtttctgataggcacctattggtcttactgacatccactttgcctttctctccacagaatcgatattggatccgccgccaccatgggagccgggcaatccagcccggcaaccgggtcacagaaccaatcaggcaacactgggagcatcatcaacaattactacatgcagcagtaccaaaactctatggacacacaacttggtgacaacgctacaagcggaggctcaaacgaggggtccacggacacaacctccacccacacaaccaacactcagaacaacgactggttctcgaagctggctagctccgctttcagcggtcttttcggcgctcttctcgccgacaagaaaaccgaggagaccactcttcttgaggaccgcatcctcactactcgtaacggacacaccacctcgacaacccagtcgagcgtaggagtcacatacgggtatgcaacggctgaggatttcgtgagcgggccaaacacctctggtcttgagaccagggttgcccaggcagagcggttctttaaaacccacctgttcgactgggtcacaagtgacccgttcggacggtgccacctgctagaacttccaactgaccacaaaggtgtctatggcagcctgaccgactcgtatgcttatatgaggaacggctgggatgttgaagtcactgctgtgggaaatcagttcaatggaggatgcctgttggtggctatggtgccagaactttgctccatacagaagagggagctgtaccagctcacgctctttcctcaccagttcatcaaccctcggacgaacatgacagcacacatcactgtgccctttgttggcgtcaaccgttatgaccagtacaaggtacacaaaccttggaccctcgtggttatggttgtagcccccctgaccgtcaacagtgaaggtgccccgcaaatcaaggtgtatgccaacatcgcacctaccaacgtacacgtcgcgggtgaattcccttccaaagaggggatcttccctgtggcttgcagcgatggttatggcggtctggtgacaactgacccgaaaacggctgaccccgcttacgggaaagtgtttaaccccccccgcaacatgttgccggggcggttcaccaattttcttgacgtggctgaggcgtgccccacgtttctccacttcgagggtgacgtgccatacgtgaccacgaagacggattcagacagggtgctcgctcagttcgacttgtctttggcagcaaagcacatgtccaacaccttccttgcaggtctcgcccagtactacacacagtacagcggcaccatcaacctgcacttcatgttcacagggcctactgacgcgaaggcgcgttacatgattgcgtatgctcctcctggcatggaaccacctaaaacgccagaggcggctgcccactgcatccatgctgaatgggacacagggttgaactcaaaattcacattttcaatcccttacctttcggcggctgattacgcttacacagcgtctgacactgctgagaccacaaatgtacagggatgggtttgcctgtttcaaataacacacgggaaagctgacggcgacgcactggtcgttttggccagcgccggaaaggactttgagctgcgcctgccggtggatgctaggacccagactacctccgcgggcgagtcagcagaccccgtgaccgccaccgttgagaattacggtggcgagacacaggtccagaggcgccaacacacggacgtgtcatttatattagacagatttgtgaaagtgacaccaaaagaccaaattaatgtattggacctgatgcaaacccctgctcacactttggtgggagcactccttcgtactgccacttactatttcgctgacttagaggtggcagtgaagcacgagggaaacctcacctgggtgccgaacggggcgcctgaagcggcgttggacaacaccaccaacccaacagcttaccacaaggcaccactcacccgacttgcactgccttacacggcgccacaccgcgtgttggctactgtttacaacgggaacagcaagtatggtgacggcacggtggccaatgtgagaggtgatctgcaagtgttggcccagaaggcggcgagagcgctgcctacctccttcaactacggtgccattaaagctactcgggtgactgaactgctttaccgcatgaagagggctgagacatactgtccccggcctcttttggccattcacccggaccaggctagacacaagcagaagattgtggctccggtgaaacagcttctaaattttgacctgctcaaattggcgggagatgtggagtccaaccctgggcccagtggtgccccaccgaccgacttgcaaaagatggtcatgagcaacactaagcctgttgagctcccccttgacggtaagacggtggccatctgctgcgccaccggagtgtttggtactgcctacctcgtgcctcgtcaccttttcgcagaaaagtacgacaggatcatgttggacggcagggccatgacagacagtgactacagagtgtttgagtttgagattaaagtaaaaggacaggacatgctctcagacgctgcgctcatggtgctccaccgtggcaaccgtgtgagagacatcacgaaacactttcgtgatacagcaagaatgaagaaaggtacccccgttgtcggcgtgatcaacaacgccgacgttgggagactgattttctccggtgaggccctcacctacaaggacattgtagtgtgcatggatggagacaccatgccgggcctatttgcctacagagccgctaccaaggctggctactgtggaggagccgttcttgccaaggacggagctgacacatttatcgtcggcactcactccgcaggaggcaatggagtcgggtactgctcatgcgtatctaggtccatgctcttgaagatgaaggcacacattgaccccgaaccacaccacgaggaattccacaagcaaaagatcattgcaccagcaaagcagcttctgaattttgacctgctcaagttggccggagacgttgagtccaacccaggaccaggagtcaaagttctgtttgccctgatctgcatcgctgtggccgaggccaagcccaccgagaacaacgaagacttcaacatcgtggccgtggccagcaacttcgcgaccacggatctcgatgctgaccgagggaagttgcccggcaagaagctgccgctggaggtgctcaaagagatggaagccaatgcccggaaagctggctgcaccaggggctgtctgatctgcctgtcccacatcaaatgcacgcccaagatgaagaagttcatcccaggacgctgccacacctacgaaggcgacaaagagtccgcacagggcggcataggcgaggcgatcgttgacattcctgagattcctgggttcaaggacttggagccaatggagcagttcatcgcacaggtcgatctgtgtgtggactgcacaactggctgcctcaaagggcttgccaacgtgcagtgttctgacctgctcaagaagtggctgccgcaacgctgtgcgacctttgccagcaagatccagggccaggtggacaagatcaagggggccggtggtgactaatctagagatatcagacatgataagatacattgatgagtttggacaaaccacaacaagaatgcagtgaaaaaaatgctttatttgtgaaatttgtgatgctattgctttatttgtaaccattataagctgcaataaacaagttaacaacaacaattgcattcattttatgtttcaggttcagggggagatgtgggaggttttttaaagcaagtaaaacctctacaaatgtggtaaatccgataaggatcgtcgactggctgcagtcggggaaatgtgcgcggaacccctatttgtttatttttctaaatacattcaaatatgtatccgctctcgagacaataaccctgataaatgcttcaataatattgaaaaaggaagagtatgagtattcaacatttcagagtggcccttattcccttttttgcagcattttgccttcctgtttttgctcacccagaaacactggtgaaagtaaaagatgctgaagaccagttgggtgccagagtgggttacattgaactggacctcaacagtggtaaaatccttgagagttttagacctgaagaaagatttccaatgatgagcacttttaaagtactgctatgtggtgctgtattatccagaattgatgcagggcaagagcaacttggtagaagaatacactattctcagaatgacttggttgagtactcaccagtcacagaaaagcatcttacagatggcatgacagtaagagaattatgcagtgctgccataaccatgagtgataacacagctgccaacttacttctgacaaccattggtggacctaaagagctaactgcttttttgcacaacatgggggaccatgtaactagacttgataggtgggaacctgagctgaatgaagccattccaaatgatgagagggacaccacaatgcctgtagcaatggcaacaactttgaggaaactattaactggtgaactacttactctagcttccagacaacaattaatagactggatggaggcagataaagttgcaggaccacttctgaggtcagccttacctgctggctggtttattgctgataaatctggagcaggtgagagagggtctaggggtatcattgcagcactggggccagatggtaagccctccagaattgtagttatctacacaacagggagtcaggcaactatggatgaaagaaatagacagatagctgagataggtgcctcactgattaagcattggtgagcatgcgaccaagtttactcatatatactttagattgatttaaaacttcatttttaatttaaaaggatctaggtgaagatcctttttgataatctcatgaccaaaatcccttaacgtgagttttcgttccactgagcggttaaccccgtagaaaagatcaaaggatcttcttgagatcctttttttctgcgcgtaatctgctgcttgcaaacaaaaaaaccaccgctaccagcggtggtttgtttgccggatcaagagctaccaactctttttccgaaggtaactggcttcagcagagcgcagataccaaatactgtccttctagtgtagccgtagttaggccaccacttcaagaactctgtagcaccgcctacatacctcgctctgctaatcctgttaccagtggctgctgccagtggcgataagtcgtgtcttaccgggttggactcaagacgatagttaccggataaggcgcagcggtcgggctgaacggggggttcgtgcacacagcccagcttggagcgaacgacctacaccgaactgagatacctacagcgtgagctatgagaaagcgccacgcttcccgaagggagaaaggcggacaggtatccggtaagcggcagggtcggaacaggagagcgcacgagggagcttccagggggaaacgcctggtatctttatagtcctgtcgggtttcgccacctctgacttgagcgtcgatttttgtgatgctcgtcaggggggcggagcctatggaaaaacgccagcaacgcggcctttttacggttcctggccttttgctggccttccactgcaatggccggccagatct

SEQ ID NO: 393 - DNA, 6674 bp, Artificial Sequence
  pJJP_O1P1-3C(I22P/L127P)-GLuc(-1M)
tcaatattggccattagccatattattcattggttatatagcataaatcaatattggctattggccattgcatacgttgtatctatatcataatatgtacatttatattggctcatgtccaatatgaccgccatgttggcattgattattgactagttattaatagtaatcaattacggggtcattagttcatagcccatatatggagttccgcgttacataacttacggtaaatggcccgcctggctgaccgcccaacgacccccgcccattgacgtcaataatgacgtatgttcccatagtaacgccaatagggactttccattgacgtcaatgggtggagtatttacggtaaactgcccacttggcagtacatcaagtgtatcatatgccaagtccgccccctattgacgtcaatgacggtaaatggcccgcctggcattatgcccagtacatgaccttacgggactttcctacttggcagtacatctacgtattagtcatcgctattaccatggtgatgcggttttggcagtacaccaatgggcgtggatagcggtttgactcacggggatttccaagtctccaccccattgacgtcaatgggagtttgttttggcaccaaaatcaacgggactttccaaaatgtcgtaacaactgcgatcgcccgccccgttgacgcaaatgggcggtaggcgtgtacggtgggaggtctatataagcagagctcgtttagtgaaccgtcagatcactagaagctttattgcggtagtttatcacagttaaattgctaacgcagtcagtgcttctgacacaacagtctcgaagattaaacttaagtgactctattaaggtagccttgcagaagttggtcgtgaggcactgggcaggtaagtatcaaggttacaagacaggtttaaggagaccaatagaaactgggcttgtcgagacagagaagactcttgcgtttctgataggcacctattggtcttactgacatccactttgcctttctctccacagaatcgatattggatccgccgccaccatgggagccgggcaatccagcccggcaaccgggtcacagaaccaatcaggcaacactgggagcatcatcaacaattactacatgcagcagtaccaaaactctatggacacacaacttggtgacaacgctacaagcggaggctcaaacgaggggtccacggacacaacctccacccacacaaccaacactcagaacaacgactggttctcgaagctggctagctccgctttcagcggtcttttcggcgctcttctcgccgacaagaaaaccgaggagaccactcttcttgaggaccgcatcctcactactcgtaacggacacaccacctcgacaacccagtcgagcgtaggagtcacatacgggtatgcaacggctgaggatttcgtgagcgggccaaacacctctggtcttgagaccagggttgcccaggcagagcggttctttaaaacccacctgttcgactgggtcacaagtgacccgttcggacggtgccacctgctagaacttccaactgaccacaaaggtgtctatggcagcctgaccgactcgtatgcttatatgaggaacggctgggatgttgaagtcactgctgtgggaaatcagttcaatggaggatgcctgttggtggctatggtgccagaactttgctccatacagaagagggagctgtaccagctcacgctctttcctcaccagttcatcaaccctcggacgaacatgacagcacacatcactgtgccctttgttggcgtcaaccgttatgaccagtacaaggtacacaaaccttggaccctcgtggttatggttgtagcccccctgaccgtcaacagtgaaggtgccccgcaaatcaaggtgtatgccaacatcgcacctaccaacgtacacgtcgcgggtgaattcccttccaaagaggggatcttccctgtggcttgcagcgatggttatggcggtctggtgacaactgacccgaaaacggctgaccccgcttacgggaaagtgtttaaccccccccgcaacatgttgccggggcggttcaccaattttcttgacgtggctgaggcgtgccccacgtttctccacttcgagggtgacgtgccatacgtgaccacgaagacggattcagacagggtgctcgctcagttcgacttgtctttggcagcaaagcacatgtccaacaccttccttgcaggtctcgcccagtactacacacagtacagcggcaccatcaacctgcacttcatgttcacagggcctactgacgcgaaggcgcgttacatgattgcgtatgctcctcctggcatggaaccacctaaaacgccagaggcggctgcccactgcatccatgctgaatgggacacagggttgaactcaaaattcacattttcaatcccttacctttcggcggctgattacgcttacacagcgtctgacactgctgagaccacaaatgtacagggatgggtttgcctgtttcaaataacacacgggaaagctgacggcgacgcactggtcgttttggccagcgccggaaaggactttgagctgcgcctgccggtggatgctaggacccagactacctccgcgggcgagtcagcagaccccgtgaccgccaccgttgagaattacggtggcgagacacaggtccagaggcgccaacacacggacgtgtcatttatattagacagatttgtgaaagtgacaccaaaagaccaaattaatgtattggacctgatgcaaacccctgctcacactttggtgggagcactccttcgtactgccacttactatttcgctgacttagaggtggcagtgaagcacgagggaaacctcacctgggtgccgaacggggcgcctgaagcggcgttggacaacaccaccaacccaacagcttaccacaaggcaccactcacccgacttgcactgccttacacggcgccacaccgcgtgttggctactgtttacaacgggaacagcaagtatggtgacggcacggtggccaatgtgagaggtgatctgcaagtgttggcccagaaggcggcgagagcgctgcctacctccttcaactacggtgccattaaagctactcgggtgactgaactgctttaccgcatgaagagggctgagacatactgtccccggcctcttttggccattcacccggaccaggctagacacaagcagaagattgtggctccggtgaaacagcttctaaattttgacctgctcaaattggcgggagatgtggagtccaaccctgggcccagtggtgccccaccgaccgacttgcaaaagatggtcatgagcaacactaagcctgttgagctcccccttgacggtaagacggtggccatctgctgcgccaccggagtgtttggtactgcctacctcgtgcctcgtcaccttttcgcagaaaagtacgacaggatcatgttggacggcagggccatgacagacagtgactacagagtgtttgagtttgagattaaagtaaaaggacaggacatgctctcagacgctgcgctcatggtgctccaccgtggcaaccgtgtgagagacatcacgaaacactttcgtgatacagcaagaatgaagaaaggtacccccgttgtcggcgtgatcaacaacgccgacgttgggagaccgattttctccggtgaggccctcacctacaaggacattgtagtgtgcatggatggagacaccatgccgggcctatttgcctacagagccgctaccaaggctggctactgtggaggagccgttcttgccaaggacggagctgacacatttatcgtcggcactcactccgcaggaggcaatggagtcgggtactgctcatgcgtatctaggtccatgctcttgaagatgaaggcacacattgaccccgaaccacaccacgaggaattccacaagcaaaagatcattgcaccagcaaagcagcttctgaattttgacctgctcaagttggccggagacgttgagtccaacccaggaccaggagtcaaagttctgtttgccctgatctgcatcgctgtggccgaggccaagcccaccgagaacaacgaagacttcaacatcgtggccgtggccagcaacttcgcgaccacggatctcgatgctgaccgagggaagttgcccggcaagaagctgccgctggaggtgctcaaagagatggaagccaatgcccggaaagctggctgcaccaggggctgtctgatctgcctgtcccacatcaaatgcacgcccaagatgaagaagttcatcccaggacgctgccacacctacgaaggcgacaaagagtccgcacagggcggcataggcgaggcgatcgttgacattcctgagattcctgggttcaaggacttggagccaatggagcagttcatcgcacaggtcgatctgtgtgtggactgcacaactggctgcctcaaagggcttgccaacgtgcagtgttctgacctgctcaagaagtggctgccgcaacgctgtgcgacctttgccagcaagatccagggccaggtggacaagatcaagggggccggtggtgactaatctagagatatcagacatgataagatacattgatgagtttggacaaaccacaacaagaatgcagtgaaaaaaatgctttatttgtgaaatttgtgatgctattgctttatttgtaaccattataagctgcaataaacaagttaacaacaacaattgcattcattttatgtttcaggttcagggggagatgtgggaggttttttaaagcaagtaaaacctctacaaatgtggtaaatccgataaggatcgtcgactggctgcagtcggggaaatgtgcgcggaacccctatttgtttatttttctaaatacattcaaatatgtatccgctctcgagacaataaccctgataaatgcttcaataatattgaaaaaggaagagtatgagtattcaacatttcagagtggcccttattcccttttttgcagcattttgccttcctgtttttgctcacccagaaacactggtgaaagtaaaagatgctgaagaccagttgggtgccagagtgggttacattgaactggacctcaacagtggtaaaatccttgagagttttagacctgaagaaagatttccaatgatgagcacttttaaagtactgctatgtggtgctgtattatccagaattgatgcagggcaagagcaacttggtagaagaatacactattctcagaatgacttggttgagtactcaccagtcacagaaaagcatcttacagatggcatgacagtaagagaattatgcagtgctgccataaccatgagtgataacacagctgccaacttacttctgacaaccattggtggacctaaagagctaactgcttttttgcacaacatgggggaccatgtaactagacttgataggtgggaacctgagctgaatgaagccattccaaatgatgagagggacaccacaatgcctgtagcaatggcaacaactttgaggaaactattaactggtgaactacttactctagcttccagacaacaattaatagactggatggaggcagataaagttgcaggaccacttctgaggtcagccttacctgctggctggtttattgctgataaatctggagcaggtgagagagggtctaggggtatcattgcagcactggggccagatggtaagccctccagaattgtagttatctacacaacagggagtcaggcaactatggatgaaagaaatagacagatagctgagataggtgcctcactgattaagcattggtgagcatgcgaccaagtttactcatatatactttagattgatttaaaacttcatttttaatttaaaaggatctaggtgaagatcctttttgataatctcatgaccaaaatcccttaacgtgagttttcgttccactgagcggttaaccccgtagaaaagatcaaaggatcttcttgagatcctttttttctgcgcgtaatctgctgcttgcaaacaaaaaaaccaccgctaccagcggtggtttgtttgccggatcaagagctaccaactctttttccgaaggtaactggcttcagcagagcgcagataccaaatactgtccttctagtgtagccgtagttaggccaccacttcaagaactctgtagcaccgcctacatacctcgctctgctaatcctgttaccagtggctgctgccagtggcgataagtcgtgtcttaccgggttggactcaagacgatagttaccggataaggcgcagcggtcgggctgaacggggggttcgtgcacacagcccagcttggagcgaacgacctacaccgaactgagatacctacagcgtgagctatgagaaagcgccacgcttcccgaagggagaaaggcggacaggtatccggtaagcggcagggtcggaacaggagagcgcacgagggagcttccagggggaaacgcctggtatctttatagtcctgtcgggtttcgccacctctgacttgagcgtcgatttttgtgatgctcgtcaggggggcggagcctatggaaaaacgccagcaacgcggcctttttacggttcctggccttttgctggccttccactgcaatggccggccagatct

SEQ ID NO: 394 - DNA, 6674 bp, Artificial Sequence
  pJJP_O1P1-3C(I22P/T100P/L127P)-GLuc(-1M)
tcaatattggccattagccatattattcattggttatatagcataaatcaatattggctattggccattgcatacgttgtatctatatcataatatgtacatttatattggctcatgtccaatatgaccgccatgttggcattgattattgactagttattaatagtaatcaattacggggtcattagttcatagcccatatatggagttccgcgttacataacttacggtaaatggcccgcctggctgaccgcccaacgacccccgcccattgacgtcaataatgacgtatgttcccatagtaacgccaatagggactttccattgacgtcaatgggtggagtatttacggtaaactgcccacttggcagtacatcaagtgtatcatatgccaagtccgccccctattgacgtcaatgacggtaaatggcccgcctggcattatgcccagtacatgaccttacgggactttcctacttggcagtacatctacgtattagtcatcgctattaccatggtgatgcggttttggcagtacaccaatgggcgtggatagcggtttgactcacggggatttccaagtctccaccccattgacgtcaatgggagtttgttttggcaccaaaatcaacgggactttccaaaatgtcgtaacaactgcgatcgcccgccccgttgacgcaaatgggcggtaggcgtgtacggtgggaggtctatataagcagagctcgtttagtgaaccgtcagatcactagaagctttattgcggtagtttatcacagttaaattgctaacgcagtcagtgcttctgacacaacagtctcgaagattaaacttaagtgactctattaaggtagccttgcagaagttggtcgtgaggcactgggcaggtaagtatcaaggttacaagacaggtttaaggagaccaatagaaactgggcttgtcgagacagagaagactcttgcgtttctgataggcacctattggtcttactgacatccactttgcctttctctccacagaatcgatattggatccgccgccaccatgggagccgggcaatccagcccggcaaccgggtcacagaaccaatcaggcaacactgggagcatcatcaacaattactacatgcagcagtaccaaaactctatggacacacaacttggtgacaacgctacaagcggaggctcaaacgaggggtccacggacacaacctccacccacacaaccaacactcagaacaacgactggttctcgaagctggctagctccgctttcagcggtcttttcggcgctcttctcgccgacaagaaaaccgaggagaccactcttcttgaggaccgcatcctcactactcgtaacggacacaccacctcgacaacccagtcgagcgtaggagtcacatacgggtatgcaacggctgaggatttcgtgagcgggccaaacacctctggtcttgagaccagggttgcccaggcagagcggttctttaaaacccacctgttcgactgggtcacaagtgacccgttcggacggtgccacctgctagaacttccaactgaccacaaaggtgtctatggcagcctgaccgactcgtatgcttatatgaggaacggctgggatgttgaagtcactgctgtgggaaatcagttcaatggaggatgcctgttggtggctatggtgccagaactttgctccatacagaagagggagctgtaccagctcacgctctttcctcaccagttcatcaaccctcggacgaacatgacagcacacatcactgtgccctttgttggcgtcaaccgttatgaccagtacaaggtacacaaaccttggaccctcgtggttatggttgtagcccccctgaccgtcaacagtgaaggtgccccgcaaatcaaggtgtatgccaacatcgcacctaccaacgtacacgtcgcgggtgaattcccttccaaagaggggatcttccctgtggcttgcagcgatggttatggcggtctggtgacaactgacccgaaaacggctgaccccgcttacgggaaagtgtttaaccccccccgcaacatgttgccggggcggttcaccaattttcttgacgtggctgaggcgtgccccacgtttctccacttcgagggtgacgtgccatacgtgaccacgaagacggattcagacagggtgctcgctcagttcgacttgtctttggcagcaaagcacatgtccaacaccttccttgcaggtctcgcccagtactacacacagtacagcggcaccatcaacctgcacttcatgttcacagggcctactgacgcgaaggcgcgttacatgattgcgtatgctcctcctggcatggaaccacctaaaacgccagaggcggctgcccactgcatccatgctgaatgggacacagggttgaactcaaaattcacattttcaatcccttacctttcggcggctgattacgcttacacagcgtctgacactgctgagaccacaaatgtacagggatgggtttgcctgtttcaaataacacacgggaaagctgacggcgacgcactggtcgttttggccagcgccggaaaggactttgagctgcgcctgccggtggatgctaggacccagactacctccgcgggcgagtcagcagaccccgtgaccgccaccgttgagaattacggtggcgagacacaggtccagaggcgccaacacacggacgtgtcatttatattagacagatttgtgaaagtgacaccaaaagaccaaattaatgtattggacctgatgcaaacccctgctcacactttggtgggagcactccttcgtactgccacttactatttcgctgacttagaggtggcagtgaagcacgagggaaacctcacctgggtgccgaacggggcgcctgaagcggcgttggacaacaccaccaacccaacagcttaccacaaggcaccactcacccgacttgcactgccttacacggcgccacaccgcgtgttggctactgtttacaacgggaacagcaagtatggtgacggcacggtggccaatgtgagaggtgatctgcaagtgttggcccagaaggcggcgagagcgctgcctacctccttcaactacggtgccattaaagctactcgggtgactgaactgctttaccgcatgaagagggctgagacatactgtccccggcctcttttggccattcacccggaccaggctagacacaagcagaagattgtggctccggtgaaacagcttctaaattttgacctgctcaaattggcgggagatgtggagtccaaccctgggcccagtggtgccccaccgaccgacttgcaaaagatggtcatgagcaacactaagcctgttgagctcccccttgacggtaagacggtggccatctgctgcgccaccggagtgtttggtactgcctacctcgtgcctcgtcaccttttcgcagaaaagtacgacaggatcatgttggacggcagggccatgacagacagtgactacagagtgtttgagtttgagattaaagtaaaaggacaggacatgctctcagacgctgcgctcatggtgctccaccgtggcaaccgtgtgagagacatcccgaaacactttcgtgatacagcaagaatgaagaaaggtacccccgttgtcggcgtgatcaacaacgccgacgttgggagaccgattttctccggtgaggccctcacctacaaggacattgtagtgtgcatggatggagacaccatgccgggcctatttgcctacagagccgctaccaaggctggctactgtggaggagccgttcttgccaaggacggagctgacacatttatcgtcggcactcactccgcaggaggcaatggagtcgggtactgctcatgcgtatctaggtccatgctcttgaagatgaaggcacacattgaccccgaaccacaccacgaggaattccacaagcaaaagatcattgcaccagcaaagcagcttctgaattttgacctgctcaagttggccggagacgttgagtccaacccaggaccaggagtcaaagttctgtttgccctgatctgcatcgctgtggccgaggccaagcccaccgagaacaacgaagacttcaacatcgtggccgtggccagcaacttcgcgaccacggatctcgatgctgaccgagggaagttgcccggcaagaagctgccgctggaggtgctcaaagagatggaagccaatgcccggaaagctggctgcaccaggggctgtctgatctgcctgtcccacatcaaatgcacgcccaagatgaagaagttcatcccaggacgctgccacacctacgaaggcgacaaagagtccgcacagggcggcataggcgaggcgatcgttgacattcctgagattcctgggttcaaggacttggagccaatggagcagttcatcgcacaggtcgatctgtgtgtggactgcacaactggctgcctcaaagggcttgccaacgtgcagtgttctgacctgctcaagaagtggctgccgcaacgctgtgcgacctttgccagcaagatccagggccaggtggacaagatcaagggggccggtggtgactaatctagagatatcagacatgataagatacattgatgagtttggacaaaccacaacaagaatgcagtgaaaaaaatgctttatttgtgaaatttgtgatgctattgctttatttgtaaccattataagctgcaataaacaagttaacaacaacaattgcattcattttatgtttcaggttcagggggagatgtgggaggttttttaaagcaagtaaaacctctacaaatgtggtaaatccgataaggatcgtcgactggctgcagtcggggaaatgtgcgcggaacccctatttgtttatttttctaaatacattcaaatatgtatccgctctcgagacaataaccctgataaatgcttcaataatattgaaaaaggaagagtatgagtattcaacatttcagagtggcccttattcccttttttgcagcattttgccttcctgtttttgctcacccagaaacactggtgaaagtaaaagatgctgaagaccagttgggtgccagagtgggttacattgaactggacctcaacagtggtaaaatccttgagagttttagacctgaagaaagatttccaatgatgagcacttttaaagtactgctatgtggtgctgtattatccagaattgatgcagggcaagagcaacttggtagaagaatacactattctcagaatgacttggttgagtactcaccagtcacagaaaagcatcttacagatggcatgacagtaagagaattatgcagtgctgccataaccatgagtgataacacagctgccaacttacttctgacaaccattggtggacctaaagagctaactgcttttttgcacaacatgggggaccatgtaactagacttgataggtgggaacctgagctgaatgaagccattccaaatgatgagagggacaccacaatgcctgtagcaatggcaacaactttgaggaaactattaactggtgaactacttactctagcttccagacaacaattaatagactggatggaggcagataaagttgcaggaccacttctgaggtcagccttacctgctggctggtttattgctgataaatctggagcaggtgagagagggtctaggggtatcattgcagcactggggccagatggtaagccctccagaattgtagttatctacacaacagggagtcaggcaactatggatgaaagaaatagacagatagctgagataggtgcctcactgattaagcattggtgagcatgcgaccaagtttactcatatatactttagattgatttaaaacttcatttttaatttaaaaggatctaggtgaagatcctttttgataatctcatgaccaaaatcccttaacgtgagttttcgttccactgagcggttaaccccgtagaaaagatcaaaggatcttcttgagatcctttttttctgcgcgtaatctgctgcttgcaaacaaaaaaaccaccgctaccagcggtggtttgtttgccggatcaagagctaccaactctttttccgaaggtaactggcttcagcagagcgcagataccaaatactgtccttctagtgtagccgtagttaggccaccacttcaagaactctgtagcaccgcctacatacctcgctctgctaatcctgttaccagtggctgctgccagtggcgataagtcgtgtcttaccgggttggactcaagacgatagttaccggataaggcgcagcggtcgggctgaacggggggttcgtgcacacagcccagcttggagcgaacgacctacaccgaactgagatacctacagcgtgagctatgagaaagcgccacgcttcccgaagggagaaaggcggacaggtatccggtaagcggcagggtcggaacaggagagcgcacgagggagcttccagggggaaacgcctggtatctttatagtcctgtcgggtttcgccacctctgacttgagcgtcgatttttgtgatgctcgtcaggggggcggagcctatggaaaaacgccagcaacgcggcctttttacggttcctggccttttgctggccttccactgcaatggccggccagatct

SEQ ID NO: 395 - DNA, 6674 bp, Artificial Sequence
  pJJP_O1P1-3C(I22P/T100P/V124P)-GLuc(-1M)
tcaatattggccattagccatattattcattggttatatagcataaatcaatattggctattggccattgcatacgttgtatctatatcataatatgtacatttatattggctcatgtccaatatgaccgccatgttggcattgattattgactagttattaatagtaatcaattacggggtcattagttcatagcccatatatggagttccgcgttacataacttacggtaaatggcccgcctggctgaccgcccaacgacccccgcccattgacgtcaataatgacgtatgttcccatagtaacgccaatagggactttccattgacgtcaatgggtggagtatttacggtaaactgcccacttggcagtacatcaagtgtatcatatgccaagtccgccccctattgacgtcaatgacggtaaatggcccgcctggcattatgcccagtacatgaccttacgggactttcctacttggcagtacatctacgtattagtcatcgctattaccatggtgatgcggttttggcagtacaccaatgggcgtggatagcggtttgactcacggggatttccaagtctccaccccattgacgtcaatgggagtttgttttggcaccaaaatcaacgggactttccaaaatgtcgtaacaactgcgatcgcccgccccgttgacgcaaatgggcggtaggcgtgtacggtgggaggtctatataagcagagctcgtttagtgaaccgtcagatcactagaagctttattgcggtagtttatcacagttaaattgctaacgcagtcagtgcttctgacacaacagtctcgaagattaaacttaagtgactctattaaggtagccttgcagaagttggtcgtgaggcactgggcaggtaagtatcaaggttacaagacaggtttaaggagaccaatagaaactgggcttgtcgagacagagaagactcttgcgtttctgataggcacctattggtcttactgacatccactttgcctttctctccacagaatcgatattggatccgccgccaccatgggagccgggcaatccagcccggcaaccgggtcacagaaccaatcaggcaacactgggagcatcatcaacaattactacatgcagcagtaccaaaactctatggacacacaacttggtgacaacgctacaagcggaggctcaaacgaggggtccacggacacaacctccacccacacaaccaacactcagaacaacgactggttctcgaagctggctagctccgctttcagcggtcttttcggcgctcttctcgccgacaagaaaaccgaggagaccactcttcttgaggaccgcatcctcactactcgtaacggacacaccacctcgacaacccagtcgagcgtaggagtcacatacgggtatgcaacggctgaggatttcgtgagcgggccaaacacctctggtcttgagaccagggttgcccaggcagagcggttctttaaaacccacctgttcgactgggtcacaagtgacccgttcggacggtgccacctgctagaacttccaactgaccacaaaggtgtctatggcagcctgaccgactcgtatgcttatatgaggaacggctgggatgttgaagtcactgctgtgggaaatcagttcaatggaggatgcctgttggtggctatggtgccagaactttgctccatacagaagagggagctgtaccagctcacgctctttcctcaccagttcatcaaccctcggacgaacatgacagcacacatcactgtgccctttgttggcgtcaaccgttatgaccagtacaaggtacacaaaccttggaccctcgtggttatggttgtagcccccctgaccgtcaacagtgaaggtgccccgcaaatcaaggtgtatgccaacatcgcacctaccaacgtacacgtcgcgggtgaattcccttccaaagaggggatcttccctgtggcttgcagcgatggttatggcggtctggtgacaactgacccgaaaacggctgaccccgcttacgggaaagtgtttaaccccccccgcaacatgttgccggggcggttcaccaattttcttgacgtggctgaggcgtgccccacgtttctccacttcgagggtgacgtgccatacgtgaccacgaagacggattcagacagggtgctcgctcagttcgacttgtctttggcagcaaagcacatgtccaacaccttccttgcaggtctcgcccagtactacacacagtacagcggcaccatcaacctgcacttcatgttcacagggcctactgacgcgaaggcgcgttacatgattgcgtatgctcctcctggcatggaaccacctaaaacgccagaggcggctgcccactgcatccatgctgaatgggacacagggttgaactcaaaattcacattttcaatcccttacctttcggcggctgattacgcttacacagcgtctgacactgctgagaccacaaatgtacagggatgggtttgcctgtttcaaataacacacgggaaagctgacggcgacgcactggtcgttttggccagcgccggaaaggactttgagctgcgcctgccggtggatgctaggacccagactacctccgcgggcgagtcagcagaccccgtgaccgccaccgttgagaattacggtggcgagacacaggtccagaggcgccaacacacggacgtgtcatttatattagacagatttgtgaaagtgacaccaaaagaccaaattaatgtattggacctgatgcaaacccctgctcacactttggtgggagcactccttcgtactgccacttactatttcgctgacttagaggtggcagtgaagcacgagggaaacctcacctgggtgccgaacggggcgcctgaagcggcgttggacaacaccaccaacccaacagcttaccacaaggcaccactcacccgacttgcactgccttacacggcgccacaccgcgtgttggctactgtttacaacgggaacagcaagtatggtgacggcacggtggccaatgtgagaggtgatctgcaagtgttggcccagaaggcggcgagagcgctgcctacctccttcaactacggtgccattaaagctactcgggtgactgaactgctttaccgcatgaagagggctgagacatactgtccccggcctcttttggccattcacccggaccaggctagacacaagcagaagattgtggctccggtgaaacagcttctaaattttgacctgctcaaattggcgggagatgtggagtccaaccctgggcccagtggtgccccaccgaccgacttgcaaaagatggtcatgagcaacactaagcctgttgagctcccccttgacggtaagacggtggccatctgctgcgccaccggagtgtttggtactgcctacctcgtgcctcgtcaccttttcgcagaaaagtacgacaggatcatgttggacggcagggccatgacagacagtgactacagagtgtttgagtttgagattaaagtaaaaggacaggacatgctctcagacgctgcgctcatggtgctccaccgtggcaaccgtgtgagagacatcccgaaacactttcgtgatacagcaagaatgaagaaaggtacccccgttgtcggcgtgatcaacaacgccgaccctgggagactgattttctccggtgaggccctcacctacaaggacattgtagtgtgcatggatggagacaccatgccgggcctatttgcctacagagccgctaccaaggctggctactgtggaggagccgttcttgccaaggacggagctgacacatttatcgtcggcactcactccgcaggaggcaatggagtcgggtactgctcatgcgtatctaggtccatgctcttgaagatgaaggcacacattgaccccgaaccacaccacgaggaattccacaagcaaaagatcattgcaccagcaaagcagcttctgaattttgacctgctcaagttggccggagacgttgagtccaacccaggaccaggagtcaaagttctgtttgccctgatctgcatcgctgtggccgaggccaagcccaccgagaacaacgaagacttcaacatcgtggccgtggccagcaacttcgcgaccacggatctcgatgctgaccgagggaagttgcccggcaagaagctgccgctggaggtgctcaaagagatggaagccaatgcccggaaagctggctgcaccaggggctgtctgatctgcctgtcccacatcaaatgcacgcccaagatgaagaagttcatcccaggacgctgccacacctacgaaggcgacaaagagtccgcacagggcggcataggcgaggcgatcgttgacattcctgagattcctgggttcaaggacttggagccaatggagcagttcatcgcacaggtcgatctgtgtgtggactgcacaactggctgcctcaaagggcttgccaacgtgcagtgttctgacctgctcaagaagtggctgccgcaacgctgtgcgacctttgccagcaagatccagggccaggtggacaagatcaagggggccggtggtgactaatctagagatatcagacatgataagatacattgatgagtttggacaaaccacaacaagaatgcagtgaaaaaaatgctttatttgtgaaatttgtgatgctattgctttatttgtaaccattataagctgcaataaacaagttaacaacaacaattgcattcattttatgtttcaggttcagggggagatgtgggaggttttttaaagcaagtaaaacctctacaaatgtggtaaatccgataaggatcgtcgactggctgcagtcggggaaatgtgcgcggaacccctatttgtttatttttctaaatacattcaaatatgtatccgctctcgagacaataaccctgataaatgcttcaataatattgaaaaaggaagagtatgagtattcaacatttcagagtggcccttattcccttttttgcagcattttgccttcctgtttttgctcacccagaaacactggtgaaagtaaaagatgctgaagaccagttgggtgccagagtgggttacattgaactggacctcaacagtggtaaaatccttgagagttttagacctgaagaaagatttccaatgatgagcacttttaaagtactgctatgtggtgctgtattatccagaattgatgcagggcaagagcaacttggtagaagaatacactattctcagaatgacttggttgagtactcaccagtcacagaaaagcatcttacagatggcatgacagtaagagaattatgcagtgctgccataaccatgagtgataacacagctgccaacttacttctgacaaccattggtggacctaaagagctaactgcttttttgcacaacatgggggaccatgtaactagacttgataggtgggaacctgagctgaatgaagccattccaaatgatgagagggacaccacaatgcctgtagcaatggcaacaactttgaggaaactattaactggtgaactacttactctagcttccagacaacaattaatagactggatggaggcagataaagttgcaggaccacttctgaggtcagccttacctgctggctggtttattgctgataaatctggagcaggtgagagagggtctaggggtatcattgcagcactggggccagatggtaagccctccagaattgtagttatctacacaacagggagtcaggcaactatggatgaaagaaatagacagatagctgagataggtgcctcactgattaagcattggtgagcatgcgaccaagtttactcatatatactttagattgatttaaaacttcatttttaatttaaaaggatctaggtgaagatcctttttgataatctcatgaccaaaatcccttaacgtgagttttcgttccactgagcggttaaccccgtagaaaagatcaaaggatcttcttgagatcctttttttctgcgcgtaatctgctgcttgcaaacaaaaaaaccaccgctaccagcggtggtttgtttgccggatcaagagctaccaactctttttccgaaggtaactggcttcagcagagcgcagataccaaatactgtccttctagtgtagccgtagttaggccaccacttcaagaactctgtagcaccgcctacatacctcgctctgctaatcctgttaccagtggctgctgccagtggcgataagtcgtgtcttaccgggttggactcaagacgatagttaccggataaggcgcagcggtcgggctgaacggggggttcgtgcacacagcccagcttggagcgaacgacctacaccgaactgagatacctacagcgtgagctatgagaaagcgccacgcttcccgaagggagaaaggcggacaggtatccggtaagcggcagggtcggaacaggagagcgcacgagggagcttccagggggaaacgcctggtatctttatagtcctgtcgggtttcgccacctctgacttgagcgtcgatttttgtgatgctcgtcaggggggcggagcctatggaaaaacgccagcaacgcggcctttttacggttcctggccttttgctggccttccactgcaatggccggccagatct

SEQ ID NO: 396 - DNA, 6674 bp, Artificial Sequence
  pJJP_O1P1-3C(I99P)-GLuc(-1M)
tcaatattggccattagccatattattcattggttatatagcataaatcaatattggctattggccattgcatacgttgtatctatatcataatatgtacatttatattggctcatgtccaatatgaccgccatgttggcattgattattgactagttattaatagtaatcaattacggggtcattagttcatagcccatatatggagttccgcgttacataacttacggtaaatggcccgcctggctgaccgcccaacgacccccgcccattgacgtcaataatgacgtatgttcccatagtaacgccaatagggactttccattgacgtcaatgggtggagtatttacggtaaactgcccacttggcagtacatcaagtgtatcatatgccaagtccgccccctattgacgtcaatgacggtaaatggcccgcctggcattatgcccagtacatgaccttacgggactttcctacttggcagtacatctacgtattagtcatcgctattaccatggtgatgcggttttggcagtacaccaatgggcgtggatagcggtttgactcacggggatttccaagtctccaccccattgacgtcaatgggagtttgttttggcaccaaaatcaacgggactttccaaaatgtcgtaacaactgcgatcgcccgccccgttgacgcaaatgggcggtaggcgtgtacggtgggaggtctatataagcagagctcgtttagtgaaccgtcagatcactagaagctttattgcggtagtttatcacagttaaattgctaacgcagtcagtgcttctgacacaacagtctcgaagattaaacttaagtgactctattaaggtagccttgcagaagttggtcgtgaggcactgggcaggtaagtatcaaggttacaagacaggtttaaggagaccaatagaaactgggcttgtcgagacagagaagactcttgcgtttctgataggcacctattggtcttactgacatccactttgcctttctctccacagaatcgatattggatccgccgccaccatgggagccgggcaatccagcccggcaaccgggtcacagaaccaatcaggcaacactgggagcatcatcaacaattactacatgcagcagtaccaaaactctatggacacacaacttggtgacaacgctacaagcggaggctcaaacgaggggtccacggacacaacctccacccacacaaccaacactcagaacaacgactggttctcgaagctggctagctccgctttcagcggtcttttcggcgctcttctcgccgacaagaaaaccgaggagaccactcttcttgaggaccgcatcctcactactcgtaacggacacaccacctcgacaacccagtcgagcgtaggagtcacatacgggtatgcaacggctgaggatttcgtgagcgggccaaacacctctggtcttgagaccagggttgcccaggcagagcggttctttaaaacccacctgttcgactgggtcacaagtgacccgttcggacggtgccacctgctagaacttccaactgaccacaaaggtgtctatggcagcctgaccgactcgtatgcttatatgaggaacggctgggatgttgaagtcactgctgtgggaaatcagttcaatggaggatgcctgttggtggctatggtgccagaactttgctccatacagaagagggagctgtaccagctcacgctctttcctcaccagttcatcaaccctcggacgaacatgacagcacacatcactgtgccctttgttggcgtcaaccgttatgaccagtacaaggtacacaaaccttggaccctcgtggttatggttgtagcccccctgaccgtcaacagtgaaggtgccccgcaaatcaaggtgtatgccaacatcgcacctaccaacgtacacgtcgcgggtgaattcccttccaaagaggggatcttccctgtggcttgcagcgatggttatggcggtctggtgacaactgacccgaaaacggctgaccccgcttacgggaaagtgtttaaccccccccgcaacatgttgccggggcggttcaccaattttcttgacgtggctgaggcgtgccccacgtttctccacttcgagggtgacgtgccatacgtgaccacgaagacggattcagacagggtgctcgctcagttcgacttgtctttggcagcaaagcacatgtccaacaccttccttgcaggtctcgcccagtactacacacagtacagcggcaccatcaacctgcacttcatgttcacagggcctactgacgcgaaggcgcgttacatgattgcgtatgctcctcctggcatggaaccacctaaaacgccagaggcggctgcccactgcatccatgctgaatgggacacagggttgaactcaaaattcacattttcaatcccttacctttcggcggctgattacgcttacacagcgtctgacactgctgagaccacaaatgtacagggatgggtttgcctgtttcaaataacacacgggaaagctgacggcgacgcactggtcgttttggccagcgccggaaaggactttgagctgcgcctgccggtggatgctaggacccagactacctccgcgggcgagtcagcagaccccgtgaccgccaccgttgagaattacggtggcgagacacaggtccagaggcgccaacacacggacgtgtcatttatattagacagatttgtgaaagtgacaccaaaagaccaaattaatgtattggacctgatgcaaacccctgctcacactttggtgggagcactccttcgtactgccacttactatttcgctgacttagaggtggcagtgaagcacgagggaaacctcacctgggtgccgaacggggcgcctgaagcggcgttggacaacaccaccaacccaacagcttaccacaaggcaccactcacccgacttgcactgccttacacggcgccacaccgcgtgttggctactgtttacaacgggaacagcaagtatggtgacggcacggtggccaatgtgagaggtgatctgcaagtgttggcccagaaggcggcgagagcgctgcctacctccttcaactacggtgccattaaagctactcgggtgactgaactgctttaccgcatgaagagggctgagacatactgtccccggcctcttttggccattcacccggaccaggctagacacaagcagaagattgtggctccggtgaaacagcttctaaattttgacctgctcaaattggcgggagatgtggagtccaaccctgggcccagtggtgccccaccgaccgacttgcaaaagatggtcatgagcaacactaagcctgttgagctcatccttgacggtaagacggtggccatctgctgcgccaccggagtgtttggtactgcctacctcgtgcctcgtcaccttttcgcagaaaagtacgacaggatcatgttggacggcagggccatgacagacagtgactacagagtgtttgagtttgagattaaagtaaaaggacaggacatgctctcagacgctgcgctcatggtgctccaccgtggcaaccgtgtgagagaccccacgaaacactttcgtgatacagcaagaatgaagaaaggtacccccgttgtcggcgtgatcaacaacgccgacgttgggagactgattttctccggtgaggccctcacctacaaggacattgtagtgtgcatggatggagacaccatgccgggcctatttgcctacagagccgctaccaaggctggctactgtggaggagccgttcttgccaaggacggagctgacacatttatcgtcggcactcactccgcaggaggcaatggagtcgggtactgctcatgcgtatctaggtccatgctcttgaagatgaaggcacacattgaccccgaaccacaccacgaggaattccacaagcaaaagatcattgcaccagcaaagcagcttctgaattttgacctgctcaagttggccggagacgttgagtccaacccaggaccaggagtcaaagttctgtttgccctgatctgcatcgctgtggccgaggccaagcccaccgagaacaacgaagacttcaacatcgtggccgtggccagcaacttcgcgaccacggatctcgatgctgaccgagggaagttgcccggcaagaagctgccgctggaggtgctcaaagagatggaagccaatgcccggaaagctggctgcaccaggggctgtctgatctgcctgtcccacatcaaatgcacgcccaagatgaagaagttcatcccaggacgctgccacacctacgaaggcgacaaagagtccgcacagggcggcataggcgaggcgatcgttgacattcctgagattcctgggttcaaggacttggagccaatggagcagttcatcgcacaggtcgatctgtgtgtggactgcacaactggctgcctcaaagggcttgccaacgtgcagtgttctgacctgctcaagaagtggctgccgcaacgctgtgcgacctttgccagcaagatccagggccaggtggacaagatcaagggggccggtggtgactaatctagagatatcagacatgataagatacattgatgagtttggacaaaccacaacaagaatgcagtgaaaaaaatgctttatttgtgaaatttgtgatgctattgctttatttgtaaccattataagctgcaataaacaagttaacaacaacaattgcattcattttatgtttcaggttcagggggagatgtgggaggttttttaaagcaagtaaaacctctacaaatgtggtaaatccgataaggatcgtcgactggctgcagtcggggaaatgtgcgcggaacccctatttgtttatttttctaaatacattcaaatatgtatccgctctcgagacaataaccctgataaatgcttcaataatattgaaaaaggaagagtatgagtattcaacatttcagagtggcccttattcccttttttgcagcattttgccttcctgtttttgctcacccagaaacactggtgaaagtaaaagatgctgaagaccagttgggtgccagagtgggttacattgaactggacctcaacagtggtaaaatccttgagagttttagacctgaagaaagatttccaatgatgagcacttttaaagtactgctatgtggtgctgtattatccagaattgatgcagggcaagagcaacttggtagaagaatacactattctcagaatgacttggttgagtactcaccagtcacagaaaagcatcttacagatggcatgacagtaagagaattatgcagtgctgccataaccatgagtgataacacagctgccaacttacttctgacaaccattggtggacctaaagagctaactgcttttttgcacaacatgggggaccatgtaactagacttgataggtgggaacctgagctgaatgaagccattccaaatgatgagagggacaccacaatgcctgtagcaatggcaacaactttgaggaaactattaactggtgaactacttactctagcttccagacaacaattaatagactggatggaggcagataaagttgcaggaccacttctgaggtcagccttacctgctggctggtttattgctgataaatctggagcaggtgagagagggtctaggggtatcattgcagcactggggccagatggtaagccctccagaattgtagttatctacacaacagggagtcaggcaactatggatgaaagaaatagacagatagctgagataggtgcctcactgattaagcattggtgagcatgcgaccaagtttactcatatatactttagattgatttaaaacttcatttttaatttaaaaggatctaggtgaagatcctttttgataatctcatgaccaaaatcccttaacgtgagttttcgttccactgagcggttaaccccgtagaaaagatcaaaggatcttcttgagatcctttttttctgcgcgtaatctgctgcttgcaaacaaaaaaaccaccgctaccagcggtggtttgtttgccggatcaagagctaccaactctttttccgaaggtaactggcttcagcagagcgcagataccaaatactgtccttctagtgtagccgtagttaggccaccacttcaagaactctgtagcaccgcctacatacctcgctctgctaatcctgttaccagtggctgctgccagtggcgataagtcgtgtcttaccgggttggactcaagacgatagttaccggataaggcgcagcggtcgggctgaacggggggttcgtgcacacagcccagcttggagcgaacgacctacaccgaactgagatacctacagcgtgagctatgagaaagcgccacgcttcccgaagggagaaaggcggacaggtatccggtaagcggcagggtcggaacaggagagcgcacgagggagcttccagggggaaacgcctggtatctttatagtcctgtcgggtttcgccacctctgacttgagcgtcgatttttgtgatgctcgtcaggggggcggagcctatggaaaaacgccagcaacgcggcctttttacggttcctggccttttgctggccttccactgcaatggccggccagatct

SEQ ID NO: 397 - DNA, 6674 bp, Artificial Sequence
  pJJP_O1P1-3C(L127P)-GLuc(-1M)
tcaatattggccattagccatattattcattggttatatagcataaatcaatattggctattggccattgcatacgttgtatctatatcataatatgtacatttatattggctcatgtccaatatgaccgccatgttggcattgattattgactagttattaatagtaatcaattacggggtcattagttcatagcccatatatggagttccgcgttacataacttacggtaaatggcccgcctggctgaccgcccaacgacccccgcccattgacgtcaataatgacgtatgttcccatagtaacgccaatagggactttccattgacgtcaatgggtggagtatttacggtaaactgcccacttggcagtacatcaagtgtatcatatgccaagtccgccccctattgacgtcaatgacggtaaatggcccgcctggcattatgcccagtacatgaccttacgggactttcctacttggcagtacatctacgtattagtcatcgctattaccatggtgatgcggttttggcagtacaccaatgggcgtggatagcggtttgactcacggggatttccaagtctccaccccattgacgtcaatgggagtttgttttggcaccaaaatcaacgggactttccaaaatgtcgtaacaactgcgatcgcccgccccgttgacgcaaatgggcggtaggcgtgtacggtgggaggtctatataagcagagctcgtttagtgaaccgtcagatcactagaagctttattgcggtagtttatcacagttaaattgctaacgcagtcagtgcttctgacacaacagtctcgaagattaaacttaagtgactctattaaggtagccttgcagaagttggtcgtgaggcactgggcaggtaagtatcaaggttacaagacaggtttaaggagaccaatagaaactgggcttgtcgagacagagaagactcttgcgtttctgataggcacctattggtcttactgacatccactttgcctttctctccacagaatcgatattggatccgccgccaccatgggagccgggcaatccagcccggcaaccgggtcacagaaccaatcaggcaacactgggagcatcatcaacaattactacatgcagcagtaccaaaactctatggacacacaacttggtgacaacgctacaagcggaggctcaaacgaggggtccacggacacaacctccacccacacaaccaacactcagaacaacgactggttctcgaagctggctagctccgctttcagcggtcttttcggcgctcttctcgccgacaagaaaaccgaggagaccactcttcttgaggaccgcatcctcactactcgtaacggacacaccacctcgacaacccagtcgagcgtaggagtcacatacgggtatgcaacggctgaggatttcgtgagcgggccaaacacctctggtcttgagaccagggttgcccaggcagagcggttctttaaaacccacctgttcgactgggtcacaagtgacccgttcggacggtgccacctgctagaacttccaactgaccacaaaggtgtctatggcagcctgaccgactcgtatgcttatatgaggaacggctgggatgttgaagtcactgctgtgggaaatcagttcaatggaggatgcctgttggtggctatggtgccagaactttgctccatacagaagagggagctgtaccagctcacgctctttcctcaccagttcatcaaccctcggacgaacatgacagcacacatcactgtgccctttgttggcgtcaaccgttatgaccagtacaaggtacacaaaccttggaccctcgtggttatggttgtagcccccctgaccgtcaacagtgaaggtgccccgcaaatcaaggtgtatgccaacatcgcacctaccaacgtacacgtcgcgggtgaattcccttccaaagaggggatcttccctgtggcttgcagcgatggttatggcggtctggtgacaactgacccgaaaacggctgaccccgcttacgggaaagtgtttaaccccccccgcaacatgttgccggggcggttcaccaattttcttgacgtggctgaggcgtgccccacgtttctccacttcgagggtgacgtgccatacgtgaccacgaagacggattcagacagggtgctcgctcagttcgacttgtctttggcagcaaagcacatgtccaacaccttccttgcaggtctcgcccagtactacacacagtacagcggcaccatcaacctgcacttcatgttcacagggcctactgacgcgaaggcgcgttacatgattgcgtatgctcctcctggcatggaaccacctaaaacgccagaggcggctgcccactgcatccatgctgaatgggacacagggttgaactcaaaattcacattttcaatcccttacctttcggcggctgattacgcttacacagcgtctgacactgctgagaccacaaatgtacagggatgggtttgcctgtttcaaataacacacgggaaagctgacggcgacgcactggtcgttttggccagcgccggaaaggactttgagctgcgcctgccggtggatgctaggacccagactacctccgcgggcgagtcagcagaccccgtgaccgccaccgttgagaattacggtggcgagacacaggtccagaggcgccaacacacggacgtgtcatttatattagacagatttgtgaaagtgacaccaaaagaccaaattaatgtattggacctgatgcaaacccctgctcacactttggtgggagcactccttcgtactgccacttactatttcgctgacttagaggtggcagtgaagcacgagggaaacctcacctgggtgccgaacggggcgcctgaagcggcgttggacaacaccaccaacccaacagcttaccacaaggcaccactcacccgacttgcactgccttacacggcgccacaccgcgtgttggctactgtttacaacgggaacagcaagtatggtgacggcacggtggccaatgtgagaggtgatctgcaagtgttggcccagaaggcggcgagagcgctgcctacctccttcaactacggtgccattaaagctactcgggtgactgaactgctttaccgcatgaagagggctgagacatactgtccccggcctcttttggccattcacccggaccaggctagacacaagcagaagattgtggctccggtgaaacagcttctaaattttgacctgctcaaattggcgggagatgtggagtccaaccctgggcccagtggtgccccaccgaccgacttgcaaaagatggtcatgagcaacactaagcctgttgagctcatccttgacggtaagacggtggccatctgctgcgccaccggagtgtttggtactgcctacctcgtgcctcgtcaccttttcgcagaaaagtacgacaggatcatgttggacggcagggccatgacagacagtgactacagagtgtttgagtttgagattaaagtaaaaggacaggacatgctctcagacgctgcgctcatggtgctccaccgtggcaaccgtgtgagagacatcacgaaacactttcgtgatacagcaagaatgaagaaaggtacccccgttgtcggcgtgatcaacaacgccgacgttgggagaccgattttctccggtgaggccctcacctacaaggacattgtagtgtgcatggatggagacaccatgccgggcctatttgcctacagagccgctaccaaggctggctactgtggaggagccgttcttgccaaggacggagctgacacatttatcgtcggcactcactccgcaggaggcaatggagtcgggtactgctcatgcgtatctaggtccatgctcttgaagatgaaggcacacattgaccccgaaccacaccacgaggaattccacaagcaaaagatcattgcaccagcaaagcagcttctgaattttgacctgctcaagttggccggagacgttgagtccaacccaggaccaggagtcaaagttctgtttgccctgatctgcatcgctgtggccgaggccaagcccaccgagaacaacgaagacttcaacatcgtggccgtggccagcaacttcgcgaccacggatctcgatgctgaccgagggaagttgcccggcaagaagctgccgctggaggtgctcaaagagatggaagccaatgcccggaaagctggctgcaccaggggctgtctgatctgcctgtcccacatcaaatgcacgcccaagatgaagaagttcatcccaggacgctgccacacctacgaaggcgacaaagagtccgcacagggcggcataggcgaggcgatcgttgacattcctgagattcctgggttcaaggacttggagccaatggagcagttcatcgcacaggtcgatctgtgtgtggactgcacaactggctgcctcaaagggcttgccaacgtgcagtgttctgacctgctcaagaagtggctgccgcaacgctgtgcgacctttgccagcaagatccagggccaggtggacaagatcaagggggccggtggtgactaatctagagatatcagacatgataagatacattgatgagtttggacaaaccacaacaagaatgcagtgaaaaaaatgctttatttgtgaaatttgtgatgctattgctttatttgtaaccattataagctgcaataaacaagttaacaacaacaattgcattcattttatgtttcaggttcagggggagatgtgggaggttttttaaagcaagtaaaacctctacaaatgtggtaaatccgataaggatcgtcgactggctgcagtcggggaaatgtgcgcggaacccctatttgtttatttttctaaatacattcaaatatgtatccgctctcgagacaataaccctgataaatgcttcaataatattgaaaaaggaagagtatgagtattcaacatttcagagtggcccttattcccttttttgcagcattttgccttcctgtttttgctcacccagaaacactggtgaaagtaaaagatgctgaagaccagttgggtgccagagtgggttacattgaactggacctcaacagtggtaaaatccttgagagttttagacctgaagaaagatttccaatgatgagcacttttaaagtactgctatgtggtgctgtattatccagaattgatgcagggcaagagcaacttggtagaagaatacactattctcagaatgacttggttgagtactcaccagtcacagaaaagcatcttacagatggcatgacagtaagagaattatgcagtgctgccataaccatgagtgataacacagctgccaacttacttctgacaaccattggtggacctaaagagctaactgcttttttgcacaacatgggggaccatgtaactagacttgataggtgggaacctgagctgaatgaagccattccaaatgatgagagggacaccacaatgcctgtagcaatggcaacaactttgaggaaactattaactggtgaactacttactctagcttccagacaacaattaatagactggatggaggcagataaagttgcaggaccacttctgaggtcagccttacctgctggctggtttattgctgataaatctggagcaggtgagagagggtctaggggtatcattgcagcactggggccagatggtaagccctccagaattgtagttatctacacaacagggagtcaggcaactatggatgaaagaaatagacagatagctgagataggtgcctcactgattaagcattggtgagcatgcgaccaagtttactcatatatactttagattgatttaaaacttcatttttaatttaaaaggatctaggtgaagatcctttttgataatctcatgaccaaaatcccttaacgtgagttttcgttccactgagcggttaaccccgtagaaaagatcaaaggatcttcttgagatcctttttttctgcgcgtaatctgctgcttgcaaacaaaaaaaccaccgctaccagcggtggtttgtttgccggatcaagagctaccaactctttttccgaaggtaactggcttcagcagagcgcagataccaaatactgtccttctagtgtagccgtagttaggccaccacttcaagaactctgtagcaccgcctacatacctcgctctgctaatcctgttaccagtggctgctgccagtggcgataagtcgtgtcttaccgggttggactcaagacgatagttaccggataaggcgcagcggtcgggctgaacggggggttcgtgcacacagcccagcttggagcgaacgacctacaccgaactgagatacctacagcgtgagctatgagaaagcgccacgcttcccgaagggagaaaggcggacaggtatccggtaagcggcagggtcggaacaggagagcgcacgagggagcttccagggggaaacgcctggtatctttatagtcctgtcgggtttcgccacctctgacttgagcgtcgatttttgtgatgctcgtcaggggggcggagcctatggaaaaacgccagcaacgcggcctttttacggttcctggccttttgctggccttccactgcaatggccggccagatct

SEQ ID NO: 398 - DNA, 6674 bp, Artificial Sequence
  pJJP_O1P1-3C(L23P)-GLuc(-1M)
tcaatattggccattagccatattattcattggttatatagcataaatcaatattggctattggccattgcatacgttgtatctatatcataatatgtacatttatattggctcatgtccaatatgaccgccatgttggcattgattattgactagttattaatagtaatcaattacggggtcattagttcatagcccatatatggagttccgcgttacataacttacggtaaatggcccgcctggctgaccgcccaacgacccccgcccattgacgtcaataatgacgtatgttcccatagtaacgccaatagggactttccattgacgtcaatgggtggagtatttacggtaaactgcccacttggcagtacatcaagtgtatcatatgccaagtccgccccctattgacgtcaatgacggtaaatggcccgcctggcattatgcccagtacatgaccttacgggactttcctacttggcagtacatctacgtattagtcatcgctattaccatggtgatgcggttttggcagtacaccaatgggcgtggatagcggtttgactcacggggatttccaagtctccaccccattgacgtcaatgggagtttgttttggcaccaaaatcaacgggactttccaaaatgtcgtaacaactgcgatcgcccgccccgttgacgcaaatgggcggtaggcgtgtacggtgggaggtctatataagcagagctcgtttagtgaaccgtcagatcactagaagctttattgcggtagtttatcacagttaaattgctaacgcagtcagtgcttctgacacaacagtctcgaagattaaacttaagtgactctattaaggtagccttgcagaagttggtcgtgaggcactgggcaggtaagtatcaaggttacaagacaggtttaaggagaccaatagaaactgggcttgtcgagacagagaagactcttgcgtttctgataggcacctattggtcttactgacatccactttgcctttctctccacagaatcgatattggatccgccgccaccatgggagccgggcaatccagcccggcaaccgggtcacagaaccaatcaggcaacactgggagcatcatcaacaattactacatgcagcagtaccaaaactctatggacacacaacttggtgacaacgctacaagcggaggctcaaacgaggggtccacggacacaacctccacccacacaaccaacactcagaacaacgactggttctcgaagctggctagctccgctttcagcggtcttttcggcgctcttctcgccgacaagaaaaccgaggagaccactcttcttgaggaccgcatcctcactactcgtaacggacacaccacctcgacaacccagtcgagcgtaggagtcacatacgggtatgcaacggctgaggatttcgtgagcgggccaaacacctctggtcttgagaccagggttgcccaggcagagcggttctttaaaacccacctgttcgactgggtcacaagtgacccgttcggacggtgccacctgctagaacttccaactgaccacaaaggtgtctatggcagcctgaccgactcgtatgcttatatgaggaacggctgggatgttgaagtcactgctgtgggaaatcagttcaatggaggatgcctgttggtggctatggtgccagaactttgctccatacagaagagggagctgtaccagctcacgctctttcctcaccagttcatcaaccctcggacgaacatgacagcacacatcactgtgccctttgttggcgtcaaccgttatgaccagtacaaggtacacaaaccttggaccctcgtggttatggttgtagcccccctgaccgtcaacagtgaaggtgccccgcaaatcaaggtgtatgccaacatcgcacctaccaacgtacacgtcgcgggtgaattcccttccaaagaggggatcttccctgtggcttgcagcgatggttatggcggtctggtgacaactgacccgaaaacggctgaccccgcttacgggaaagtgtttaaccccccccgcaacatgttgccggggcggttcaccaattttcttgacgtggctgaggcgtgccccacgtttctccacttcgagggtgacgtgccatacgtgaccacgaagacggattcagacagggtgctcgctcagttcgacttgtctttggcagcaaagcacatgtccaacaccttccttgcaggtctcgcccagtactacacacagtacagcggcaccatcaacctgcacttcatgttcacagggcctactgacgcgaaggcgcgttacatgattgcgtatgctcctcctggcatggaaccacctaaaacgccagaggcggctgcccactgcatccatgctgaatgggacacagggttgaactcaaaattcacattttcaatcccttacctttcggcggctgattacgcttacacagcgtctgacactgctgagaccacaaatgtacagggatgggtttgcctgtttcaaataacacacgggaaagctgacggcgacgcactggtcgttttggccagcgccggaaaggactttgagctgcgcctgccggtggatgctaggacccagactacctccgcgggcgagtcagcagaccccgtgaccgccaccgttgagaattacggtggcgagacacaggtccagaggcgccaacacacggacgtgtcatttatattagacagatttgtgaaagtgacaccaaaagaccaaattaatgtattggacctgatgcaaacccctgctcacactttggtgggagcactccttcgtactgccacttactatttcgctgacttagaggtggcagtgaagcacgagggaaacctcacctgggtgccgaacggggcgcctgaagcggcgttggacaacaccaccaacccaacagcttaccacaaggcaccactcacccgacttgcactgccttacacggcgccacaccgcgtgttggctactgtttacaacgggaacagcaagtatggtgacggcacggtggccaatgtgagaggtgatctgcaagtgttggcccagaaggcggcgagagcgctgcctacctccttcaactacggtgccattaaagctactcgggtgactgaactgctttaccgcatgaagagggctgagacatactgtccccggcctcttttggccattcacccggaccaggctagacacaagcagaagattgtggctccggtgaaacagcttctaaattttgacctgctcaaattggcgggagatgtggagtccaaccctgggcccagtggtgccccaccgaccgacttgcaaaagatggtcatgagcaacactaagcctgttgagctcatccctgacggtaagacggtggccatctgctgcgccaccggagtgtttggtactgcctacctcgtgcctcgtcaccttttcgcagaaaagtacgacaggatcatgttggacggcagggccatgacagacagtgactacagagtgtttgagtttgagattaaagtaaaaggacaggacatgctctcagacgctgcgctcatggtgctccaccgtggcaaccgtgtgagagacatcacgaaacactttcgtgatacagcaagaatgaagaaaggtacccccgttgtcggcgtgatcaacaacgccgacgttgggagactgattttctccggtgaggccctcacctacaaggacattgtagtgtgcatggatggagacaccatgccgggcctatttgcctacagagccgctaccaaggctggctactgtggaggagccgttcttgccaaggacggagctgacacatttatcgtcggcactcactccgcaggaggcaatggagtcgggtactgctcatgcgtatctaggtccatgctcttgaagatgaaggcacacattgaccccgaaccacaccacgaggaattccacaagcaaaagatcattgcaccagcaaagcagcttctgaattttgacctgctcaagttggccggagacgttgagtccaacccaggaccaggagtcaaagttctgtttgccctgatctgcatcgctgtggccgaggccaagcccaccgagaacaacgaagacttcaacatcgtggccgtggccagcaacttcgcgaccacggatctcgatgctgaccgagggaagttgcccggcaagaagctgccgctggaggtgctcaaagagatggaagccaatgcccggaaagctggctgcaccaggggctgtctgatctgcctgtcccacatcaaatgcacgcccaagatgaagaagttcatcccaggacgctgccacacctacgaaggcgacaaagagtccgcacagggcggcataggcgaggcgatcgttgacattcctgagattcctgggttcaaggacttggagccaatggagcagttcatcgcacaggtcgatctgtgtgtggactgcacaactggctgcctcaaagggcttgccaacgtgcagtgttctgacctgctcaagaagtggctgccgcaacgctgtgcgacctttgccagcaagatccagggccaggtggacaagatcaagggggccggtggtgactaatctagagatatcagacatgataagatacattgatgagtttggacaaaccacaacaagaatgcagtgaaaaaaatgctttatttgtgaaatttgtgatgctattgctttatttgtaaccattataagctgcaataaacaagttaacaacaacaattgcattcattttatgtttcaggttcagggggagatgtgggaggttttttaaagcaagtaaaacctctacaaatgtggtaaatccgataaggatcgtcgactggctgcagtcggggaaatgtgcgcggaacccctatttgtttatttttctaaatacattcaaatatgtatccgctctcgagacaataaccctgataaatgcttcaataatattgaaaaaggaagagtatgagtattcaacatttcagagtggcccttattcccttttttgcagcattttgccttcctgtttttgctcacccagaaacactggtgaaagtaaaagatgctgaagaccagttgggtgccagagtgggttacattgaactggacctcaacagtggtaaaatccttgagagttttagacctgaagaaagatttccaatgatgagcacttttaaagtactgctatgtggtgctgtattatccagaattgatgcagggcaagagcaacttggtagaagaatacactattctcagaatgacttggttgagtactcaccagtcacagaaaagcatcttacagatggcatgacagtaagagaattatgcagtgctgccataaccatgagtgataacacagctgccaacttacttctgacaaccattggtggacctaaagagctaactgcttttttgcacaacatgggggaccatgtaactagacttgataggtgggaacctgagctgaatgaagccattccaaatgatgagagggacaccacaatgcctgtagcaatggcaacaactttgaggaaactattaactggtgaactacttactctagcttccagacaacaattaatagactggatggaggcagataaagttgcaggaccacttctgaggtcagccttacctgctggctggtttattgctgataaatctggagcaggtgagagagggtctaggggtatcattgcagcactggggccagatggtaagccctccagaattgtagttatctacacaacagggagtcaggcaactatggatgaaagaaatagacagatagctgagataggtgcctcactgattaagcattggtgagcatgcgaccaagtttactcatatatactttagattgatttaaaacttcatttttaatttaaaaggatctaggtgaagatcctttttgataatctcatgaccaaaatcccttaacgtgagttttcgttccactgagcggttaaccccgtagaaaagatcaaaggatcttcttgagatcctttttttctgcgcgtaatctgctgcttgcaaacaaaaaaaccaccgctaccagcggtggtttgtttgccggatcaagagctaccaactctttttccgaaggtaactggcttcagcagagcgcagataccaaatactgtccttctagtgtagccgtagttaggccaccacttcaagaactctgtagcaccgcctacatacctcgctctgctaatcctgttaccagtggctgctgccagtggcgataagtcgtgtcttaccgggttggactcaagacgatagttaccggataaggcgcagcggtcgggctgaacggggggttcgtgcacacagcccagcttggagcgaacgacctacaccgaactgagatacctacagcgtgagctatgagaaagcgccacgcttcccgaagggagaaaggcggacaggtatccggtaagcggcagggtcggaacaggagagcgcacgagggagcttccagggggaaacgcctggtatctttatagtcctgtcgggtttcgccacctctgacttgagcgtcgatttttgtgatgctcgtcaggggggcggagcctatggaaaaacgccagcaacgcggcctttttacggttcctggccttttgctggccttccactgcaatggccggccagatct

SEQ ID NO: 399 - DNA, 6674 bp, Artificial Sequence
  pJJP_O1P1-3C(R126P)-GLuc(-1M)
tcaatattggccattagccatattattcattggttatatagcataaatcaatattggctattggccattgcatacgttgtatctatatcataatatgtacatttatattggctcatgtccaatatgaccgccatgttggcattgattattgactagttattaatagtaatcaattacggggtcattagttcatagcccatatatggagttccgcgttacataacttacggtaaatggcccgcctggctgaccgcccaacgacccccgcccattgacgtcaataatgacgtatgttcccatagtaacgccaatagggactttccattgacgtcaatgggtggagtatttacggtaaactgcccacttggcagtacatcaagtgtatcatatgccaagtccgccccctattgacgtcaatgacggtaaatggcccgcctggcattatgcccagtacatgaccttacgggactttcctacttggcagtacatctacgtattagtcatcgctattaccatggtgatgcggttttggcagtacaccaatgggcgtggatagcggtttgactcacggggatttccaagtctccaccccattgacgtcaatgggagtttgttttggcaccaaaatcaacgggactttccaaaatgtcgtaacaactgcgatcgcccgccccgttgacgcaaatgggcggtaggcgtgtacggtgggaggtctatataagcagagctcgtttagtgaaccgtcagatcactagaagctttattgcggtagtttatcacagttaaattgctaacgcagtcagtgcttctgacacaacagtctcgaagattaaacttaagtgactctattaaggtagccttgcagaagttggtcgtgaggcactgggcaggtaagtatcaaggttacaagacaggtttaaggagaccaatagaaactgggcttgtcgagacagagaagactcttgcgtttctgataggcacctattggtcttactgacatccactttgcctttctctccacagaatcgatattggatccgccgccaccatgggagccgggcaatccagcccggcaaccgggtcacagaaccaatcaggcaacactgggagcatcatcaacaattactacatgcagcagtaccaaaactctatggacacacaacttggtgacaacgctacaagcggaggctcaaacgaggggtccacggacacaacctccacccacacaaccaacactcagaacaacgactggttctcgaagctggctagctccgctttcagcggtcttttcggcgctcttctcgccgacaagaaaaccgaggagaccactcttcttgaggaccgcatcctcactactcgtaacggacacaccacctcgacaacccagtcgagcgtaggagtcacatacgggtatgcaacggctgaggatttcgtgagcgggccaaacacctctggtcttgagaccagggttgcccaggcagagcggttctttaaaacccacctgttcgactgggtcacaagtgacccgttcggacggtgccacctgctagaacttccaactgaccacaaaggtgtctatggcagcctgaccgactcgtatgcttatatgaggaacggctgggatgttgaagtcactgctgtgggaaatcagttcaatggaggatgcctgttggtggctatggtgccagaactttgctccatacagaagagggagctgtaccagctcacgctctttcctcaccagttcatcaaccctcggacgaacatgacagcacacatcactgtgccctttgttggcgtcaaccgttatgaccagtacaaggtacacaaaccttggaccctcgtggttatggttgtagcccccctgaccgtcaacagtgaaggtgccccgcaaatcaaggtgtatgccaacatcgcacctaccaacgtacacgtcgcgggtgaattcccttccaaagaggggatcttccctgtggcttgcagcgatggttatggcggtctggtgacaactgacccgaaaacggctgaccccgcttacgggaaagtgtttaaccccccccgcaacatgttgccggggcggttcaccaattttcttgacgtggctgaggcgtgccccacgtttctccacttcgagggtgacgtgccatacgtgaccacgaagacggattcagacagggtgctcgctcagttcgacttgtctttggcagcaaagcacatgtccaacaccttccttgcaggtctcgcccagtactacacacagtacagcggcaccatcaacctgcacttcatgttcacagggcctactgacgcgaaggcgcgttacatgattgcgtatgctcctcctggcatggaaccacctaaaacgccagaggcggctgcccactgcatccatgctgaatgggacacagggttgaactcaaaattcacattttcaatcccttacctttcggcggctgattacgcttacacagcgtctgacactgctgagaccacaaatgtacagggatgggtttgcctgtttcaaataacacacgggaaagctgacggcgacgcactggtcgttttggccagcgccggaaaggactttgagctgcgcctgccggtggatgctaggacccagactacctccgcgggcgagtcagcagaccccgtgaccgccaccgttgagaattacggtggcgagacacaggtccagaggcgccaacacacggacgtgtcatttatattagacagatttgtgaaagtgacaccaaaagaccaaattaatgtattggacctgatgcaaacccctgctcacactttggtgggagcactccttcgtactgccacttactatttcgctgacttagaggtggcagtgaagcacgagggaaacctcacctgggtgccgaacggggcgcctgaagcggcgttggacaacaccaccaacccaacagcttaccacaaggcaccactcacccgacttgcactgccttacacggcgccacaccgcgtgttggctactgtttacaacgggaacagcaagtatggtgacggcacggtggccaatgtgagaggtgatctgcaagtgttggcccagaaggcggcgagagcgctgcctacctccttcaactacggtgccattaaagctactcgggtgactgaactgctttaccgcatgaagagggctgagacatactgtccccggcctcttttggccattcacccggaccaggctagacacaagcagaagattgtggctccggtgaaacagcttctaaattttgacctgctcaaattggcgggagatgtggagtccaaccctgggcccagtggtgccccaccgaccgacttgcaaaagatggtcatgagcaacactaagcctgttgagctcatccttgacggtaagacggtggccatctgctgcgccaccggagtgtttggtactgcctacctcgtgcctcgtcaccttttcgcagaaaagtacgacaggatcatgttggacggcagggccatgacagacagtgactacagagtgtttgagtttgagattaaagtaaaaggacaggacatgctctcagacgctgcgctcatggtgctccaccgtggcaaccgtgtgagagacatcacgaaacactttcgtgatacagcaagaatgaagaaaggtacccccgttgtcggcgtgatcaacaacgccgacgttgggccactgattttctccggtgaggccctcacctacaaggacattgtagtgtgcatggatggagacaccatgccgggcctatttgcctacagagccgctaccaaggctggctactgtggaggagccgttcttgccaaggacggagctgacacatttatcgtcggcactcactccgcaggaggcaatggagtcgggtactgctcatgcgtatctaggtccatgctcttgaagatgaaggcacacattgaccccgaaccacaccacgaggaattccacaagcaaaagatcattgcaccagcaaagcagcttctgaattttgacctgctcaagttggccggagacgttgagtccaacccaggaccaggagtcaaagttctgtttgccctgatctgcatcgctgtggccgaggccaagcccaccgagaacaacgaagacttcaacatcgtggccgtggccagcaacttcgcgaccacggatctcgatgctgaccgagggaagttgcccggcaagaagctgccgctggaggtgctcaaagagatggaagccaatgcccggaaagctggctgcaccaggggctgtctgatctgcctgtcccacatcaaatgcacgcccaagatgaagaagttcatcccaggacgctgccacacctacgaaggcgacaaagagtccgcacagggcggcataggcgaggcgatcgttgacattcctgagattcctgggttcaaggacttggagccaatggagcagttcatcgcacaggtcgatctgtgtgtggactgcacaactggctgcctcaaagggcttgccaacgtgcagtgttctgacctgctcaagaagtggctgccgcaacgctgtgcgacctttgccagcaagatccagggccaggtggacaagatcaagggggccggtggtgactaatctagagatatcagacatgataagatacattgatgagtttggacaaaccacaacaagaatgcagtgaaaaaaatgctttatttgtgaaatttgtgatgctattgctttatttgtaaccattataagctgcaataaacaagttaacaacaacaattgcattcattttatgtttcaggttcagggggagatgtgggaggttttttaaagcaagtaaaacctctacaaatgtggtaaatccgataaggatcgtcgactggctgcagtcggggaaatgtgcgcggaacccctatttgtttatttttctaaatacattcaaatatgtatccgctctcgagacaataaccctgataaatgcttcaataatattgaaaaaggaagagtatgagtattcaacatttcagagtggcccttattcccttttttgcagcattttgccttcctgtttttgctcacccagaaacactggtgaaagtaaaagatgctgaagaccagttgggtgccagagtgggttacattgaactggacctcaacagtggtaaaatccttgagagttttagacctgaagaaagatttccaatgatgagcacttttaaagtactgctatgtggtgctgtattatccagaattgatgcagggcaagagcaacttggtagaagaatacactattctcagaatgacttggttgagtactcaccagtcacagaaaagcatcttacagatggcatgacagtaagagaattatgcagtgctgccataaccatgagtgataacacagctgccaacttacttctgacaaccattggtggacctaaagagctaactgcttttttgcacaacatgggggaccatgtaactagacttgataggtgggaacctgagctgaatgaagccattccaaatgatgagagggacaccacaatgcctgtagcaatggcaacaactttgaggaaactattaactggtgaactacttactctagcttccagacaacaattaatagactggatggaggcagataaagttgcaggaccacttctgaggtcagccttacctgctggctggtttattgctgataaatctggagcaggtgagagagggtctaggggtatcattgcagcactggggccagatggtaagccctccagaattgtagttatctacacaacagggagtcaggcaactatggatgaaagaaatagacagatagctgagataggtgcctcactgattaagcattggtgagcatgcgaccaagtttactcatatatactttagattgatttaaaacttcatttttaatttaaaaggatctaggtgaagatcctttttgataatctcatgaccaaaatcccttaacgtgagttttcgttccactgagcggttaaccccgtagaaaagatcaaaggatcttcttgagatcctttttttctgcgcgtaatctgctgcttgcaaacaaaaaaaccaccgctaccagcggtggtttgtttgccggatcaagagctaccaactctttttccgaaggtaactggcttcagcagagcgcagataccaaatactgtccttctagtgtagccgtagttaggccaccacttcaagaactctgtagcaccgcctacatacctcgctctgctaatcctgttaccagtggctgctgccagtggcgataagtcgtgtcttaccgggttggactcaagacgatagttaccggataaggcgcagcggtcgggctgaacggggggttcgtgcacacagcccagcttggagcgaacgacctacaccgaactgagatacctacagcgtgagctatgagaaagcgccacgcttcccgaagggagaaaggcggacaggtatccggtaagcggcagggtcggaacaggagagcgcacgagggagcttccagggggaaacgcctggtatctttatagtcctgtcgggtttcgccacctctgacttgagcgtcgatttttgtgatgctcgtcaggggggcggagcctatggaaaaacgccagcaacgcggcctttttacggttcctggccttttgctggccttccactgcaatggccggccagatct

SEQ ID NO: 400 - DNA, 6674 bp, Artificial Sequence
  pJJP_O1P1-3C(T100P)-GLuc(-1M)
tcaatattggccattagccatattattcattggttatatagcataaatcaatattggctattggccattgcatacgttgtatctatatcataatatgtacatttatattggctcatgtccaatatgaccgccatgttggcattgattattgactagttattaatagtaatcaattacggggtcattagttcatagcccatatatggagttccgcgttacataacttacggtaaatggcccgcctggctgaccgcccaacgacccccgcccattgacgtcaataatgacgtatgttcccatagtaacgccaatagggactttccattgacgtcaatgggtggagtatttacggtaaactgcccacttggcagtacatcaagtgtatcatatgccaagtccgccccctattgacgtcaatgacggtaaatggcccgcctggcattatgcccagtacatgaccttacgggactttcctacttggcagtacatctacgtattagtcatcgctattaccatggtgatgcggttttggcagtacaccaatgggcgtggatagcggtttgactcacggggatttccaagtctccaccccattgacgtcaatgggagtttgttttggcaccaaaatcaacgggactttccaaaatgtcgtaacaactgcgatcgcccgccccgttgacgcaaatgggcggtaggcgtgtacggtgggaggtctatataagcagagctcgtttagtgaaccgtcagatcactagaagctttattgcggtagtttatcacagttaaattgctaacgcagtcagtgcttctgacacaacagtctcgaagattaaacttaagtgactctattaaggtagccttgcagaagttggtcgtgaggcactgggcaggtaagtatcaaggttacaagacaggtttaaggagaccaatagaaactgggcttgtcgagacagagaagactcttgcgtttctgataggcacctattggtcttactgacatccactttgcctttctctccacagaatcgatattggatccgccgccaccatgggagccgggcaatccagcccggcaaccgggtcacagaaccaatcaggcaacactgggagcatcatcaacaattactacatgcagcagtaccaaaactctatggacacacaacttggtgacaacgctacaagcggaggctcaaacgaggggtccacggacacaacctccacccacacaaccaacactcagaacaacgactggttctcgaagctggctagctccgctttcagcggtcttttcggcgctcttctcgccgacaagaaaaccgaggagaccactcttcttgaggaccgcatcctcactactcgtaacggacacaccacctcgacaacccagtcgagcgtaggagtcacatacgggtatgcaacggctgaggatttcgtgagcgggccaaacacctctggtcttgagaccagggttgcccaggcagagcggttctttaaaacccacctgttcgactgggtcacaagtgacccgttcggacggtgccacctgctagaacttccaactgaccacaaaggtgtctatggcagcctgaccgactcgtatgcttatatgaggaacggctgggatgttgaagtcactgctgtgggaaatcagttcaatggaggatgcctgttggtggctatggtgccagaactttgctccatacagaagagggagctgtaccagctcacgctctttcctcaccagttcatcaaccctcggacgaacatgacagcacacatcactgtgccctttgttggcgtcaaccgttatgaccagtacaaggtacacaaaccttggaccctcgtggttatggttgtagcccccctgaccgtcaacagtgaaggtgccccgcaaatcaaggtgtatgccaacatcgcacctaccaacgtacacgtcgcgggtgaattcccttccaaagaggggatcttccctgtggcttgcagcgatggttatggcggtctggtgacaactgacccgaaaacggctgaccccgcttacgggaaagtgtttaaccccccccgcaacatgttgccggggcggttcaccaattttcttgacgtggctgaggcgtgccccacgtttctccacttcgagggtgacgtgccatacgtgaccacgaagacggattcagacagggtgctcgctcagttcgacttgtctttggcagcaaagcacatgtccaacaccttccttgcaggtctcgcccagtactacacacagtacagcggcaccatcaacctgcacttcatgttcacagggcctactgacgcgaaggcgcgttacatgattgcgtatgctcctcctggcatggaaccacctaaaacgccagaggcggctgcccactgcatccatgctgaatgggacacagggttgaactcaaaattcacattttcaatcccttacctttcggcggctgattacgcttacacagcgtctgacactgctgagaccacaaatgtacagggatgggtttgcctgtttcaaataacacacgggaaagctgacggcgacgcactggtcgttttggccagcgccggaaaggactttgagctgcgcctgccggtggatgctaggacccagactacctccgcgggcgagtcagcagaccccgtgaccgccaccgttgagaattacggtggcgagacacaggtccagaggcgccaacacacggacgtgtcatttatattagacagatttgtgaaagtgacaccaaaagaccaaattaatgtattggacctgatgcaaacccctgctcacactttggtgggagcactccttcgtactgccacttactatttcgctgacttagaggtggcagtgaagcacgagggaaacctcacctgggtgccgaacggggcgcctgaagcggcgttggacaacaccaccaacccaacagcttaccacaaggcaccactcacccgacttgcactgccttacacggcgccacaccgcgtgttggctactgtttacaacgggaacagcaagtatggtgacggcacggtggccaatgtgagaggtgatctgcaagtgttggcccagaaggcggcgagagcgctgcctacctccttcaactacggtgccattaaagctactcgggtgactgaactgctttaccgcatgaagagggctgagacatactgtccccggcctcttttggccattcacccggaccaggctagacacaagcagaagattgtggctccggtgaaacagcttctaaattttgacctgctcaaattggcgggagatgtggagtccaaccctgggcccagtggtgccccaccgaccgacttgcaaaagatggtcatgagcaacactaagcctgttgagctcatccttgacggtaagacggtggccatctgctgcgccaccggagtgtttggtactgcctacctcgtgcctcgtcaccttttcgcagaaaagtacgacaggatcatgttggacggcagggccatgacagacagtgactacagagtgtttgagtttgagattaaagtaaaaggacaggacatgctctcagacgctgcgctcatggtgctccaccgtggcaaccgtgtgagagacatcccgaaacactttcgtgatacagcaagaatgaagaaaggtacccccgttgtcggcgtgatcaacaacgccgacgttgggagactgattttctccggtgaggccctcacctacaaggacattgtagtgtgcatggatggagacaccatgccgggcctatttgcctacagagccgctaccaaggctggctactgtggaggagccgttcttgccaaggacggagctgacacatttatcgtcggcactcactccgcaggaggcaatggagtcgggtactgctcatgcgtatctaggtccatgctcttgaagatgaaggcacacattgaccccgaaccacaccacgaggaattccacaagcaaaagatcattgcaccagcaaagcagcttctgaattttgacctgctcaagttggccggagacgttgagtccaacccaggaccaggagtcaaagttctgtttgccctgatctgcatcgctgtggccgaggccaagcccaccgagaacaacgaagacttcaacatcgtggccgtggccagcaacttcgcgaccacggatctcgatgctgaccgagggaagttgcccggcaagaagctgccgctggaggtgctcaaagagatggaagccaatgcccggaaagctggctgcaccaggggctgtctgatctgcctgtcccacatcaaatgcacgcccaagatgaagaagttcatcccaggacgctgccacacctacgaaggcgacaaagagtccgcacagggcggcataggcgaggcgatcgttgacattcctgagattcctgggttcaaggacttggagccaatggagcagttcatcgcacaggtcgatctgtgtgtggactgcacaactggctgcctcaaagggcttgccaacgtgcagtgttctgacctgctcaagaagtggctgccgcaacgctgtgcgacctttgccagcaagatccagggccaggtggacaagatcaagggggccggtggtgactaatctagagatatcagacatgataagatacattgatgagtttggacaaaccacaacaagaatgcagtgaaaaaaatgctttatttgtgaaatttgtgatgctattgctttatttgtaaccattataagctgcaataaacaagttaacaacaacaattgcattcattttatgtttcaggttcagggggagatgtgggaggttttttaaagcaagtaaaacctctacaaatgtggtaaatccgataaggatcgtcgactggctgcagtcggggaaatgtgcgcggaacccctatttgtttatttttctaaatacattcaaatatgtatccgctctcgagacaataaccctgataaatgcttcaataatattgaaaaaggaagagtatgagtattcaacatttcagagtggcccttattcccttttttgcagcattttgccttcctgtttttgctcacccagaaacactggtgaaagtaaaagatgctgaagaccagttgggtgccagagtgggttacattgaactggacctcaacagtggtaaaatccttgagagttttagacctgaagaaagatttccaatgatgagcacttttaaagtactgctatgtggtgctgtattatccagaattgatgcagggcaagagcaacttggtagaagaatacactattctcagaatgacttggttgagtactcaccagtcacagaaaagcatcttacagatggcatgacagtaagagaattatgcagtgctgccataaccatgagtgataacacagctgccaacttacttctgacaaccattggtggacctaaagagctaactgcttttttgcacaacatgggggaccatgtaactagacttgataggtgggaacctgagctgaatgaagccattccaaatgatgagagggacaccacaatgcctgtagcaatggcaacaactttgaggaaactattaactggtgaactacttactctagcttccagacaacaattaatagactggatggaggcagataaagttgcaggaccacttctgaggtcagccttacctgctggctggtttattgctgataaatctggagcaggtgagagagggtctaggggtatcattgcagcactggggccagatggtaagccctccagaattgtagttatctacacaacagggagtcaggcaactatggatgaaagaaatagacagatagctgagataggtgcctcactgattaagcattggtgagcatgcgaccaagtttactcatatatactttagattgatttaaaacttcatttttaatttaaaaggatctaggtgaagatcctttttgataatctcatgaccaaaatcccttaacgtgagttttcgttccactgagcggttaaccccgtagaaaagatcaaaggatcttcttgagatcctttttttctgcgcgtaatctgctgcttgcaaacaaaaaaaccaccgctaccagcggtggtttgtttgccggatcaagagctaccaactctttttccgaaggtaactggcttcagcagagcgcagataccaaatactgtccttctagtgtagccgtagttaggccaccacttcaagaactctgtagcaccgcctacatacctcgctctgctaatcctgttaccagtggctgctgccagtggcgataagtcgtgtcttaccgggttggactcaagacgatagttaccggataaggcgcagcggtcgggctgaacggggggttcgtgcacacagcccagcttggagcgaacgacctacaccgaactgagatacctacagcgtgagctatgagaaagcgccacgcttcccgaagggagaaaggcggacaggtatccggtaagcggcagggtcggaacaggagagcgcacgagggagcttccagggggaaacgcctggtatctttatagtcctgtcgggtttcgccacctctgacttgagcgtcgatttttgtgatgctcgtcaggggggcggagcctatggaaaaacgccagcaacgcggcctttttacggttcctggccttttgctggccttccactgcaatggccggccagatct

SEQ ID NO: 401 - DNA, 6674 bp, Artificial Sequence
  pJJP_O1P1-3C(T100P/L127P)-GLuc(-1M)
tcaatattggccattagccatattattcattggttatatagcataaatcaatattggctattggccattgcatacgttgtatctatatcataatatgtacatttatattggctcatgtccaatatgaccgccatgttggcattgattattgactagttattaatagtaatcaattacggggtcattagttcatagcccatatatggagttccgcgttacataacttacggtaaatggcccgcctggctgaccgcccaacgacccccgcccattgacgtcaataatgacgtatgttcccatagtaacgccaatagggactttccattgacgtcaatgggtggagtatttacggtaaactgcccacttggcagtacatcaagtgtatcatatgccaagtccgccccctattgacgtcaatgacggtaaatggcccgcctggcattatgcccagtacatgaccttacgggactttcctacttggcagtacatctacgtattagtcatcgctattaccatggtgatgcggttttggcagtacaccaatgggcgtggatagcggtttgactcacggggatttccaagtctccaccccattgacgtcaatgggagtttgttttggcaccaaaatcaacgggactttccaaaatgtcgtaacaactgcgatcgcccgccccgttgacgcaaatgggcggtaggcgtgtacggtgggaggtctatataagcagagctcgtttagtgaaccgtcagatcactagaagctttattgcggtagtttatcacagttaaattgctaacgcagtcagtgcttctgacacaacagtctcgaagattaaacttaagtgactctattaaggtagccttgcagaagttggtcgtgaggcactgggcaggtaagtatcaaggttacaagacaggtttaaggagaccaatagaaactgggcttgtcgagacagagaagactcttgcgtttctgataggcacctattggtcttactgacatccactttgcctttctctccacagaatcgatattggatccgccgccaccatgggagccgggcaatccagcccggcaaccgggtcacagaaccaatcaggcaacactgggagcatcatcaacaattactacatgcagcagtaccaaaactctatggacacacaacttggtgacaacgctacaagcggaggctcaaacgaggggtccacggacacaacctccacccacacaaccaacactcagaacaacgactggttctcgaagctggctagctccgctttcagcggtcttttcggcgctcttctcgccgacaagaaaaccgaggagaccactcttcttgaggaccgcatcctcactactcgtaacggacacaccacctcgacaacccagtcgagcgtaggagtcacatacgggtatgcaacggctgaggatttcgtgagcgggccaaacacctctggtcttgagaccagggttgcccaggcagagcggttctttaaaacccacctgttcgactgggtcacaagtgacccgttcggacggtgccacctgctagaacttccaactgaccacaaaggtgtctatggcagcctgaccgactcgtatgcttatatgaggaacggctgggatgttgaagtcactgctgtgggaaatcagttcaatggaggatgcctgttggtggctatggtgccagaactttgctccatacagaagagggagctgtaccagctcacgctctttcctcaccagttcatcaaccctcggacgaacatgacagcacacatcactgtgccctttgttggcgtcaaccgttatgaccagtacaaggtacacaaaccttggaccctcgtggttatggttgtagcccccctgaccgtcaacagtgaaggtgccccgcaaatcaaggtgtatgccaacatcgcacctaccaacgtacacgtcgcgggtgaattcccttccaaagaggggatcttccctgtggcttgcagcgatggttatggcggtctggtgacaactgacccgaaaacggctgaccccgcttacgggaaagtgtttaaccccccccgcaacatgttgccggggcggttcaccaattttcttgacgtggctgaggcgtgccccacgtttctccacttcgagggtgacgtgccatacgtgaccacgaagacggattcagacagggtgctcgctcagttcgacttgtctttggcagcaaagcacatgtccaacaccttccttgcaggtctcgcccagtactacacacagtacagcggcaccatcaacctgcacttcatgttcacagggcctactgacgcgaaggcgcgttacatgattgcgtatgctcctcctggcatggaaccacctaaaacgccagaggcggctgcccactgcatccatgctgaatgggacacagggttgaactcaaaattcacattttcaatcccttacctttcggcggctgattacgcttacacagcgtctgacactgctgagaccacaaatgtacagggatgggtttgcctgtttcaaataacacacgggaaagctgacggcgacgcactggtcgttttggccagcgccggaaaggactttgagctgcgcctgccggtggatgctaggacccagactacctccgcgggcgagtcagcagaccccgtgaccgccaccgttgagaattacggtggcgagacacaggtccagaggcgccaacacacggacgtgtcatttatattagacagatttgtgaaagtgacaccaaaagaccaaattaatgtattggacctgatgcaaacccctgctcacactttggtgggagcactccttcgtactgccacttactatttcgctgacttagaggtggcagtgaagcacgagggaaacctcacctgggtgccgaacggggcgcctgaagcggcgttggacaacaccaccaacccaacagcttaccacaaggcaccactcacccgacttgcactgccttacacggcgccacaccgcgtgttggctactgtttacaacgggaacagcaagtatggtgacggcacggtggccaatgtgagaggtgatctgcaagtgttggcccagaaggcggcgagagcgctgcctacctccttcaactacggtgccattaaagctactcgggtgactgaactgctttaccgcatgaagagggctgagacatactgtccccggcctcttttggccattcacccggaccaggctagacacaagcagaagattgtggctccggtgaaacagcttctaaattttgacctgctcaaattggcgggagatgtggagtccaaccctgggcccagtggtgccccaccgaccgacttgcaaaagatggtcatgagcaacactaagcctgttgagctcatccttgacggtaagacggtggccatctgctgcgccaccggagtgtttggtactgcctacctcgtgcctcgtcaccttttcgcagaaaagtacgacaggatcatgttggacggcagggccatgacagacagtgactacagagtgtttgagtttgagattaaagtaaaaggacaggacatgctctcagacgctgcgctcatggtgctccaccgtggcaaccgtgtgagagacatcccgaaacactttcgtgatacagcaagaatgaagaaaggtacccccgttgtcggcgtgatcaacaacgccgacgttgggagaccgattttctccggtgaggccctcacctacaaggacattgtagtgtgcatggatggagacaccatgccgggcctatttgcctacagagccgctaccaaggctggctactgtggaggagccgttcttgccaaggacggagctgacacatttatcgtcggcactcactccgcaggaggcaatggagtcgggtactgctcatgcgtatctaggtccatgctcttgaagatgaaggcacacattgaccccgaaccacaccacgaggaattccacaagcaaaagatcattgcaccagcaaagcagcttctgaattttgacctgctcaagttggccggagacgttgagtccaacccaggaccaggagtcaaagttctgtttgccctgatctgcatcgctgtggccgaggccaagcccaccgagaacaacgaagacttcaacatcgtggccgtggccagcaacttcgcgaccacggatctcgatgctgaccgagggaagttgcccggcaagaagctgccgctggaggtgctcaaagagatggaagccaatgcccggaaagctggctgcaccaggggctgtctgatctgcctgtcccacatcaaatgcacgcccaagatgaagaagttcatcccaggacgctgccacacctacgaaggcgacaaagagtccgcacagggcggcataggcgaggcgatcgttgacattcctgagattcctgggttcaaggacttggagccaatggagcagttcatcgcacaggtcgatctgtgtgtggactgcacaactggctgcctcaaagggcttgccaacgtgcagtgttctgacctgctcaagaagtggctgccgcaacgctgtgcgacctttgccagcaagatccagggccaggtggacaagatcaagggggccggtggtgactaatctagagatatcagacatgataagatacattgatgagtttggacaaaccacaacaagaatgcagtgaaaaaaatgctttatttgtgaaatttgtgatgctattgctttatttgtaaccattataagctgcaataaacaagttaacaacaacaattgcattcattttatgtttcaggttcagggggagatgtgggaggttttttaaagcaagtaaaacctctacaaatgtggtaaatccgataaggatcgtcgactggctgcagtcggggaaatgtgcgcggaacccctatttgtttatttttctaaatacattcaaatatgtatccgctctcgagacaataaccctgataaatgcttcaataatattgaaaaaggaagagtatgagtattcaacatttcagagtggcccttattcccttttttgcagcattttgccttcctgtttttgctcacccagaaacactggtgaaagtaaaagatgctgaagaccagttgggtgccagagtgggttacattgaactggacctcaacagtggtaaaatccttgagagttttagacctgaagaaagatttccaatgatgagcacttttaaagtactgctatgtggtgctgtattatccagaattgatgcagggcaagagcaacttggtagaagaatacactattctcagaatgacttggttgagtactcaccagtcacagaaaagcatcttacagatggcatgacagtaagagaattatgcagtgctgccataaccatgagtgataacacagctgccaacttacttctgacaaccattggtggacctaaagagctaactgcttttttgcacaacatgggggaccatgtaactagacttgataggtgggaacctgagctgaatgaagccattccaaatgatgagagggacaccacaatgcctgtagcaatggcaacaactttgaggaaactattaactggtgaactacttactctagcttccagacaacaattaatagactggatggaggcagataaagttgcaggaccacttctgaggtcagccttacctgctggctggtttattgctgataaatctggagcaggtgagagagggtctaggggtatcattgcagcactggggccagatggtaagccctccagaattgtagttatctacacaacagggagtcaggcaactatggatgaaagaaatagacagatagctgagataggtgcctcactgattaagcattggtgagcatgcgaccaagtttactcatatatactttagattgatttaaaacttcatttttaatttaaaaggatctaggtgaagatcctttttgataatctcatgaccaaaatcccttaacgtgagttttcgttccactgagcggttaaccccgtagaaaagatcaaaggatcttcttgagatcctttttttctgcgcgtaatctgctgcttgcaaacaaaaaaaccaccgctaccagcggtggtttgtttgccggatcaagagctaccaactctttttccgaaggtaactggcttcagcagagcgcagataccaaatactgtccttctagtgtagccgtagttaggccaccacttcaagaactctgtagcaccgcctacatacctcgctctgctaatcctgttaccagtggctgctgccagtggcgataagtcgtgtcttaccgggttggactcaagacgatagttaccggataaggcgcagcggtcgggctgaacggggggttcgtgcacacagcccagcttggagcgaacgacctacaccgaactgagatacctacagcgtgagctatgagaaagcgccacgcttcccgaagggagaaaggcggacaggtatccggtaagcggcagggtcggaacaggagagcgcacgagggagcttccagggggaaacgcctggtatctttatagtcctgtcgggtttcgccacctctgacttgagcgtcgatttttgtgatgctcgtcaggggggcggagcctatggaaaaacgccagcaacgcggcctttttacggttcctggccttttgctggccttccactgcaatggccggccagatct

SEQ ID NO: 402 - DNA, 6674 bp, Artificial Sequence
  pJJP_O1P1-3C(T34A/M88L)-GLuc(-1M)
tcaatattggccattagccatattattcattggttatatagcataaatcaatattggctattggccattgcatacgttgtatctatatcataatatgtacatttatattggctcatgtccaatatgaccgccatgttggcattgattattgactagttattaatagtaatcaattacggggtcattagttcatagcccatatatggagttccgcgttacataacttacggtaaatggcccgcctggctgaccgcccaacgacccccgcccattgacgtcaataatgacgtatgttcccatagtaacgccaatagggactttccattgacgtcaatgggtggagtatttacggtaaactgcccacttggcagtacatcaagtgtatcatatgccaagtccgccccctattgacgtcaatgacggtaaatggcccgcctggcattatgcccagtacatgaccttacgggactttcctacttggcagtacatctacgtattagtcatcgctattaccatggtgatgcggttttggcagtacaccaatgggcgtggatagcggtttgactcacggggatttccaagtctccaccccattgacgtcaatgggagtttgttttggcaccaaaatcaacgggactttccaaaatgtcgtaacaactgcgatcgcccgccccgttgacgcaaatgggcggtaggcgtgtacggtgggaggtctatataagcagagctcgtttagtgaaccgtcagatcactagaagctttattgcggtagtttatcacagttaaattgctaacgcagtcagtgcttctgacacaacagtctcgaagattaaacttaagtgactctattaaggtagccttgcagaagttggtcgtgaggcactgggcaggtaagtatcaaggttacaagacaggtttaaggagaccaatagaaactgggcttgtcgagacagagaagactcttgcgtttctgataggcacctattggtcttactgacatccactttgcctttctctccacagaatcgatattggatccgccgccaccatgggagccgggcaatccagcccggcaaccgggtcacagaaccaatcaggcaacactgggagcatcatcaacaattactacatgcagcagtaccaaaactctatggacacacaacttggtgacaacgctacaagcggaggctcaaacgaggggtccacggacacaacctccacccacacaaccaacactcagaacaacgactggttctcgaagctggctagctccgctttcagcggtcttttcggcgctcttctcgccgacaagaaaaccgaggagaccactcttcttgaggaccgcatcctcactactcgtaacggacacaccacctcgacaacccagtcgagcgtaggagtcacatacgggtatgcaacggctgaggatttcgtgagcgggccaaacacctctggtcttgagaccagggttgcccaggcagagcggttctttaaaacccacctgttcgactgggtcacaagtgacccgttcggacggtgccacctgctagaacttccaactgaccacaaaggtgtctatggcagcctgaccgactcgtatgcttatatgaggaacggctgggatgttgaagtcactgctgtgggaaatcagttcaatggaggatgcctgttggtggctatggtgccagaactttgctccatacagaagagggagctgtaccagctcacgctctttcctcaccagttcatcaaccctcggacgaacatgacagcacacatcactgtgccctttgttggcgtcaaccgttatgaccagtacaaggtacacaaaccttggaccctcgtggttatggttgtagcccccctgaccgtcaacagtgaaggtgccccgcaaatcaaggtgtatgccaacatcgcacctaccaacgtacacgtcgcgggtgaattcccttccaaagaggggatcttccctgtggcttgcagcgatggttatggcggtctggtgacaactgacccgaaaacggctgaccccgcttacgggaaagtgtttaaccccccccgcaacatgttgccggggcggttcaccaattttcttgacgtggctgaggcgtgccccacgtttctccacttcgagggtgacgtgccatacgtgaccacgaagacggattcagacagggtgctcgctcagttcgacttgtctttggcagcaaagcacatgtccaacaccttccttgcaggtctcgcccagtactacacacagtacagcggcaccatcaacctgcacttcatgttcacagggcctactgacgcgaaggcgcgttacatgattgcgtatgctcctcctggcatggaaccacctaaaacgccagaggcggctgcccactgcatccatgctgaatgggacacagggttgaactcaaaattcacattttcaatcccttacctttcggcggctgattacgcttacacagcgtctgacactgctgagaccacaaatgtacagggatgggtttgcctgtttcaaataacacacgggaaagctgacggcgacgcactggtcgttttggccagcgccggaaaggactttgagctgcgcctgccggtggatgctaggacccagactacctccgcgggcgagtcagcagaccccgtgaccgccaccgttgagaattacggtggcgagacacaggtccagaggcgccaacacacggacgtgtcatttatattagacagatttgtgaaagtgacaccaaaagaccaaattaatgtattggacctgatgcaaacccctgctcacactttggtgggagcactccttcgtactgccacttactatttcgctgacttagaggtggcagtgaagcacgagggaaacctcacctgggtgccgaacggggcgcctgaagcggcgttggacaacaccaccaacccaacagcttaccacaaggcaccactcacccgacttgcactgccttacacggcgccacaccgcgtgttggctactgtttacaacgggaacagcaagtatggtgacggcacggtggccaatgtgagaggtgatctgcaagtgttggcccagaaggcggcgagagcgctgcctacctccttcaactacggtgccattaaagctactcgggtgactgaactgctttaccgcatgaagagggctgagacatactgtccccggcctcttttggccattcacccggaccaggctagacacaagcagaagattgtggctccggtgaaacagcttctaaattttgacctgctcaaattggcgggagatgtggagtccaaccctgggcccagtggtgccccaccgaccgacttgcaaaagatggtcatgagcaacactaagcctgttgagctcatccttgacggtaagacggtggccatctgctgcgccgccggagtgtttggtactgcctacctcgtgcctcgtcaccttttcgcagaaaagtacgacaggatcatgttggacggcagggccatgacagacagtgactacagagtgtttgagtttgagattaaagtaaaaggacaggacatgctctcagacgctgcgctcctggtgctccaccgtggcaaccgtgtgagagacatcacgaaacactttcgtgatacagcaagaatgaagaaaggtacccccgttgtcggcgtgatcaacaacgccgacgttgggagactgattttctccggtgaggccctcacctacaaggacattgtagtgtgcatggatggagacaccatgccgggcctatttgcctacagagccgctaccaaggctggctactgtggaggagccgttcttgccaaggacggagctgacacatttatcgtcggcactcactccgcaggaggcaatggagtcgggtactgctcatgcgtatctaggtccatgctcttgaagatgaaggcacacattgaccccgaaccacaccacgaggaattccacaagcaaaagatcattgcaccagcaaagcagcttctgaattttgacctgctcaagttggccggagacgttgagtccaacccaggaccaggagtcaaagttctgtttgccctgatctgcatcgctgtggccgaggccaagcccaccgagaacaacgaagacttcaacatcgtggccgtggccagcaacttcgcgaccacggatctcgatgctgaccgagggaagttgcccggcaagaagctgccgctggaggtgctcaaagagatggaagccaatgcccggaaagctggctgcaccaggggctgtctgatctgcctgtcccacatcaaatgcacgcccaagatgaagaagttcatcccaggacgctgccacacctacgaaggcgacaaagagtccgcacagggcggcataggcgaggcgatcgttgacattcctgagattcctgggttcaaggacttggagccaatggagcagttcatcgcacaggtcgatctgtgtgtggactgcacaactggctgcctcaaagggcttgccaacgtgcagtgttctgacctgctcaagaagtggctgccgcaacgctgtgcgacctttgccagcaagatccagggccaggtggacaagatcaagggggccggtggtgactaatctagagatatcagacatgataagatacattgatgagtttggacaaaccacaacaagaatgcagtgaaaaaaatgctttatttgtgaaatttgtgatgctattgctttatttgtaaccattataagctgcaataaacaagttaacaacaacaattgcattcattttatgtttcaggttcagggggagatgtgggaggttttttaaagcaagtaaaacctctacaaatgtggtaaatccgataaggatcgtcgactggctgcagtcggggaaatgtgcgcggaacccctatttgtttatttttctaaatacattcaaatatgtatccgctctcgagacaataaccctgataaatgcttcaataatattgaaaaaggaagagtatgagtattcaacatttcagagtggcccttattcccttttttgcagcattttgccttcctgtttttgctcacccagaaacactggtgaaagtaaaagatgctgaagaccagttgggtgccagagtgggttacattgaactggacctcaacagtggtaaaatccttgagagttttagacctgaagaaagatttccaatgatgagcacttttaaagtactgctatgtggtgctgtattatccagaattgatgcagggcaagagcaacttggtagaagaatacactattctcagaatgacttggttgagtactcaccagtcacagaaaagcatcttacagatggcatgacagtaagagaattatgcagtgctgccataaccatgagtgataacacagctgccaacttacttctgacaaccattggtggacctaaagagctaactgcttttttgcacaacatgggggaccatgtaactagacttgataggtgggaacctgagctgaatgaagccattccaaatgatgagagggacaccacaatgcctgtagcaatggcaacaactttgaggaaactattaactggtgaactacttactctagcttccagacaacaattaatagactggatggaggcagataaagttgcaggaccacttctgaggtcagccttacctgctggctggtttattgctgataaatctggagcaggtgagagagggtctaggggtatcattgcagcactggggccagatggtaagccctccagaattgtagttatctacacaacagggagtcaggcaactatggatgaaagaaatagacagatagctgagataggtgcctcactgattaagcattggtgagcatgcgaccaagtttactcatatatactttagattgatttaaaacttcatttttaatttaaaaggatctaggtgaagatcctttttgataatctcatgaccaaaatcccttaacgtgagttttcgttccactgagcggttaaccccgtagaaaagatcaaaggatcttcttgagatcctttttttctgcgcgtaatctgctgcttgcaaacaaaaaaaccaccgctaccagcggtggtttgtttgccggatcaagagctaccaactctttttccgaaggtaactggcttcagcagagcgcagataccaaatactgtccttctagtgtagccgtagttaggccaccacttcaagaactctgtagcaccgcctacatacctcgctctgctaatcctgttaccagtggctgctgccagtggcgataagtcgtgtcttaccgggttggactcaagacgatagttaccggataaggcgcagcggtcgggctgaacggggggttcgtgcacacagcccagcttggagcgaacgacctacaccgaactgagatacctacagcgtgagctatgagaaagcgccacgcttcccgaagggagaaaggcggacaggtatccggtaagcggcagggtcggaacaggagagcgcacgagggagcttccagggggaaacgcctggtatctttatagtcctgtcgggtttcgccacctctgacttgagcgtcgatttttgtgatgctcgtcaggggggcggagcctatggaaaaacgccagcaacgcggcctttttacggttcctggccttttgctggccttccactgcaatggccggccagatct

SEQ ID NO: 403 - DNA, 6674 bp, Artificial Sequence
  pJJP_O1P1-3C(V124P)-GLuc(-1M)
tcaatattggccattagccatattattcattggttatatagcataaatcaatattggctattggccattgcatacgttgtatctatatcataatatgtacatttatattggctcatgtccaatatgaccgccatgttggcattgattattgactagttattaatagtaatcaattacggggtcattagttcatagcccatatatggagttccgcgttacataacttacggtaaatggcccgcctggctgaccgcccaacgacccccgcccattgacgtcaataatgacgtatgttcccatagtaacgccaatagggactttccattgacgtcaatgggtggagtatttacggtaaactgcccacttggcagtacatcaagtgtatcatatgccaagtccgccccctattgacgtcaatgacggtaaatggcccgcctggcattatgcccagtacatgaccttacgggactttcctacttggcagtacatctacgtattagtcatcgctattaccatggtgatgcggttttggcagtacaccaatgggcgtggatagcggtttgactcacggggatttccaagtctccaccccattgacgtcaatgggagtttgttttggcaccaaaatcaacgggactttccaaaatgtcgtaacaactgcgatcgcccgccccgttgacgcaaatgggcggtaggcgtgtacggtgggaggtctatataagcagagctcgtttagtgaaccgtcagatcactagaagctttattgcggtagtttatcacagttaaattgctaacgcagtcagtgcttctgacacaacagtctcgaagattaaacttaagtgactctattaaggtagccttgcagaagttggtcgtgaggcactgggcaggtaagtatcaaggttacaagacaggtttaaggagaccaatagaaactgggcttgtcgagacagagaagactcttgcgtttctgataggcacctattggtcttactgacatccactttgcctttctctccacagaatcgatattggatccgccgccaccatgggagccgggcaatccagcccggcaaccgggtcacagaaccaatcaggcaacactgggagcatcatcaacaattactacatgcagcagtaccaaaactctatggacacacaacttggtgacaacgctacaagcggaggctcaaacgaggggtccacggacacaacctccacccacacaaccaacactcagaacaacgactggttctcgaagctggctagctccgctttcagcggtcttttcggcgctcttctcgccgacaagaaaaccgaggagaccactcttcttgaggaccgcatcctcactactcgtaacggacacaccacctcgacaacccagtcgagcgtaggagtcacatacgggtatgcaacggctgaggatttcgtgagcgggccaaacacctctggtcttgagaccagggttgcccaggcagagcggttctttaaaacccacctgttcgactgggtcacaagtgacccgttcggacggtgccacctgctagaacttccaactgaccacaaaggtgtctatggcagcctgaccgactcgtatgcttatatgaggaacggctgggatgttgaagtcactgctgtgggaaatcagttcaatggaggatgcctgttggtggctatggtgccagaactttgctccatacagaagagggagctgtaccagctcacgctctttcctcaccagttcatcaaccctcggacgaacatgacagcacacatcactgtgccctttgttggcgtcaaccgttatgaccagtacaaggtacacaaaccttggaccctcgtggttatggttgtagcccccctgaccgtcaacagtgaaggtgccccgcaaatcaaggtgtatgccaacatcgcacctaccaacgtacacgtcgcgggtgaattcccttccaaagaggggatcttccctgtggcttgcagcgatggttatggcggtctggtgacaactgacccgaaaacggctgaccccgcttacgggaaagtgtttaaccccccccgcaacatgttgccggggcggttcaccaattttcttgacgtggctgaggcgtgccccacgtttctccacttcgagggtgacgtgccatacgtgaccacgaagacggattcagacagggtgctcgctcagttcgacttgtctttggcagcaaagcacatgtccaacaccttccttgcaggtctcgcccagtactacacacagtacagcggcaccatcaacctgcacttcatgttcacagggcctactgacgcgaaggcgcgttacatgattgcgtatgctcctcctggcatggaaccacctaaaacgccagaggcggctgcccactgcatccatgctgaatgggacacagggttgaactcaaaattcacattttcaatcccttacctttcggcggctgattacgcttacacagcgtctgacactgctgagaccacaaatgtacagggatgggtttgcctgtttcaaataacacacgggaaagctgacggcgacgcactggtcgttttggccagcgccggaaaggactttgagctgcgcctgccggtggatgctaggacccagactacctccgcgggcgagtcagcagaccccgtgaccgccaccgttgagaattacggtggcgagacacaggtccagaggcgccaacacacggacgtgtcatttatattagacagatttgtgaaagtgacaccaaaagaccaaattaatgtattggacctgatgcaaacccctgctcacactttggtgggagcactccttcgtactgccacttactatttcgctgacttagaggtggcagtgaagcacgagggaaacctcacctgggtgccgaacggggcgcctgaagcggcgttggacaacaccaccaacccaacagcttaccacaaggcaccactcacccgacttgcactgccttacacggcgccacaccgcgtgttggctactgtttacaacgggaacagcaagtatggtgacggcacggtggccaatgtgagaggtgatctgcaagtgttggcccagaaggcggcgagagcgctgcctacctccttcaactacggtgccattaaagctactcgggtgactgaactgctttaccgcatgaagagggctgagacatactgtccccggcctcttttggccattcacccggaccaggctagacacaagcagaagattgtggctccggtgaaacagcttctaaattttgacctgctcaaattggcgggagatgtggagtccaaccctgggcccagtggtgccccaccgaccgacttgcaaaagatggtcatgagcaacactaagcctgttgagctcatccttgacggtaagacggtggccatctgctgcgccaccggagtgtttggtactgcctacctcgtgcctcgtcaccttttcgcagaaaagtacgacaggatcatgttggacggcagggccatgacagacagtgactacagagtgtttgagtttgagattaaagtaaaaggacaggacatgctctcagacgctgcgctcatggtgctccaccgtggcaaccgtgtgagagacatcacgaaacactttcgtgatacagcaagaatgaagaaaggtacccccgttgtcggcgtgatcaacaacgccgaccctgggagactgattttctccggtgaggccctcacctacaaggacattgtagtgtgcatggatggagacaccatgccgggcctatttgcctacagagccgctaccaaggctggctactgtggaggagccgttcttgccaaggacggagctgacacatttatcgtcggcactcactccgcaggaggcaatggagtcgggtactgctcatgcgtatctaggtccatgctcttgaagatgaaggcacacattgaccccgaaccacaccacgaggaattccacaagcaaaagatcattgcaccagcaaagcagcttctgaattttgacctgctcaagttggccggagacgttgagtccaacccaggaccaggagtcaaagttctgtttgccctgatctgcatcgctgtggccgaggccaagcccaccgagaacaacgaagacttcaacatcgtggccgtggccagcaacttcgcgaccacggatctcgatgctgaccgagggaagttgcccggcaagaagctgccgctggaggtgctcaaagagatggaagccaatgcccggaaagctggctgcaccaggggctgtctgatctgcctgtcccacatcaaatgcacgcccaagatgaagaagttcatcccaggacgctgccacacctacgaaggcgacaaagagtccgcacagggcggcataggcgaggcgatcgttgacattcctgagattcctgggttcaaggacttggagccaatggagcagttcatcgcacaggtcgatctgtgtgtggactgcacaactggctgcctcaaagggcttgccaacgtgcagtgttctgacctgctcaagaagtggctgccgcaacgctgtgcgacctttgccagcaagatccagggccaggtggacaagatcaagggggccggtggtgactaatctagagatatcagacatgataagatacattgatgagtttggacaaaccacaacaagaatgcagtgaaaaaaatgctttatttgtgaaatttgtgatgctattgctttatttgtaaccattataagctgcaataaacaagttaacaacaacaattgcattcattttatgtttcaggttcagggggagatgtgggaggttttttaaagcaagtaaaacctctacaaatgtggtaaatccgataaggatcgtcgactggctgcagtcggggaaatgtgcgcggaacccctatttgtttatttttctaaatacattcaaatatgtatccgctctcgagacaataaccctgataaatgcttcaataatattgaaaaaggaagagtatgagtattcaacatttcagagtggcccttattcccttttttgcagcattttgccttcctgtttttgctcacccagaaacactggtgaaagtaaaagatgctgaagaccagttgggtgccagagtgggttacattgaactggacctcaacagtggtaaaatccttgagagttttagacctgaagaaagatttccaatgatgagcacttttaaagtactgctatgtggtgctgtattatccagaattgatgcagggcaagagcaacttggtagaagaatacactattctcagaatgacttggttgagtactcaccagtcacagaaaagcatcttacagatggcatgacagtaagagaattatgcagtgctgccataaccatgagtgataacacagctgccaacttacttctgacaaccattggtggacctaaagagctaactgcttttttgcacaacatgggggaccatgtaactagacttgataggtgggaacctgagctgaatgaagccattccaaatgatgagagggacaccacaatgcctgtagcaatggcaacaactttgaggaaactattaactggtgaactacttactctagcttccagacaacaattaatagactggatggaggcagataaagttgcaggaccacttctgaggtcagccttacctgctggctggtttattgctgataaatctggagcaggtgagagagggtctaggggtatcattgcagcactggggccagatggtaagccctccagaattgtagttatctacacaacagggagtcaggcaactatggatgaaagaaatagacagatagctgagataggtgcctcactgattaagcattggtgagcatgcgaccaagtttactcatatatactttagattgatttaaaacttcatttttaatttaaaaggatctaggtgaagatcctttttgataatctcatgaccaaaatcccttaacgtgagttttcgttccactgagcggttaaccccgtagaaaagatcaaaggatcttcttgagatcctttttttctgcgcgtaatctgctgcttgcaaacaaaaaaaccaccgctaccagcggtggtttgtttgccggatcaagagctaccaactctttttccgaaggtaactggcttcagcagagcgcagataccaaatactgtccttctagtgtagccgtagttaggccaccacttcaagaactctgtagcaccgcctacatacctcgctctgctaatcctgttaccagtggctgctgccagtggcgataagtcgtgtcttaccgggttggactcaagacgatagttaccggataaggcgcagcggtcgggctgaacggggggttcgtgcacacagcccagcttggagcgaacgacctacaccgaactgagatacctacagcgtgagctatgagaaagcgccacgcttcccgaagggagaaaggcggacaggtatccggtaagcggcagggtcggaacaggagagcgcacgagggagcttccagggggaaacgcctggtatctttatagtcctgtcgggtttcgccacctctgacttgagcgtcgatttttgtgatgctcgtcaggggggcggagcctatggaaaaacgccagcaacgcggcctttttacggttcctggccttttgctggccttccactgcaatggccggccagatct

SEQ ID NO: 404 - DNA, 6674 bp, Artificial Sequence
  pJJP_O1P1-3C(V124P/L127P)-GLuc(-1M)
tcaatattggccattagccatattattcattggttatatagcataaatcaatattggctattggccattgcatacgttgtatctatatcataatatgtacatttatattggctcatgtccaatatgaccgccatgttggcattgattattgactagttattaatagtaatcaattacggggtcattagttcatagcccatatatggagttccgcgttacataacttacggtaaatggcccgcctggctgaccgcccaacgacccccgcccattgacgtcaataatgacgtatgttcccatagtaacgccaatagggactttccattgacgtcaatgggtggagtatttacggtaaactgcccacttggcagtacatcaagtgtatcatatgccaagtccgccccctattgacgtcaatgacggtaaatggcccgcctggcattatgcccagtacatgaccttacgggactttcctacttggcagtacatctacgtattagtcatcgctattaccatggtgatgcggttttggcagtacaccaatgggcgtggatagcggtttgactcacggggatttccaagtctccaccccattgacgtcaatgggagtttgttttggcaccaaaatcaacgggactttccaaaatgtcgtaacaactgcgatcgcccgccccgttgacgcaaatgggcggtaggcgtgtacggtgggaggtctatataagcagagctcgtttagtgaaccgtcagatcactagaagctttattgcggtagtttatcacagttaaattgctaacgcagtcagtgcttctgacacaacagtctcgaagattaaacttaagtgactctattaaggtagccttgcagaagttggtcgtgaggcactgggcaggtaagtatcaaggttacaagacaggtttaaggagaccaatagaaactgggcttgtcgagacagagaagactcttgcgtttctgataggcacctattggtcttactgacatccactttgcctttctctccacagaatcgatattggatccgccgccaccatgggagccgggcaatccagcccggcaaccgggtcacagaaccaatcaggcaacactgggagcatcatcaacaattactacatgcagcagtaccaaaactctatggacacacaacttggtgacaacgctacaagcggaggctcaaacgaggggtccacggacacaacctccacccacacaaccaacactcagaacaacgactggttctcgaagctggctagctccgctttcagcggtcttttcggcgctcttctcgccgacaagaaaaccgaggagaccactcttcttgaggaccgcatcctcactactcgtaacggacacaccacctcgacaacccagtcgagcgtaggagtcacatacgggtatgcaacggctgaggatttcgtgagcgggccaaacacctctggtcttgagaccagggttgcccaggcagagcggttctttaaaacccacctgttcgactgggtcacaagtgacccgttcggacggtgccacctgctagaacttccaactgaccacaaaggtgtctatggcagcctgaccgactcgtatgcttatatgaggaacggctgggatgttgaagtcactgctgtgggaaatcagttcaatggaggatgcctgttggtggctatggtgccagaactttgctccatacagaagagggagctgtaccagctcacgctctttcctcaccagttcatcaaccctcggacgaacatgacagcacacatcactgtgccctttgttggcgtcaaccgttatgaccagtacaaggtacacaaaccttggaccctcgtggttatggttgtagcccccctgaccgtcaacagtgaaggtgccccgcaaatcaaggtgtatgccaacatcgcacctaccaacgtacacgtcgcgggtgaattcccttccaaagaggggatcttccctgtggcttgcagcgatggttatggcggtctggtgacaactgacccgaaaacggctgaccccgcttacgggaaagtgtttaaccccccccgcaacatgttgccggggcggttcaccaattttcttgacgtggctgaggcgtgccccacgtttctccacttcgagggtgacgtgccatacgtgaccacgaagacggattcagacagggtgctcgctcagttcgacttgtctttggcagcaaagcacatgtccaacaccttccttgcaggtctcgcccagtactacacacagtacagcggcaccatcaacctgcacttcatgttcacagggcctactgacgcgaaggcgcgttacatgattgcgtatgctcctcctggcatggaaccacctaaaacgccagaggcggctgcccactgcatccatgctgaatgggacacagggttgaactcaaaattcacattttcaatcccttacctttcggcggctgattacgcttacacagcgtctgacactgctgagaccacaaatgtacagggatgggtttgcctgtttcaaataacacacgggaaagctgacggcgacgcactggtcgttttggccagcgccggaaaggactttgagctgcgcctgccggtggatgctaggacccagactacctccgcgggcgagtcagcagaccccgtgaccgccaccgttgagaattacggtggcgagacacaggtccagaggcgccaacacacggacgtgtcatttatattagacagatttgtgaaagtgacaccaaaagaccaaattaatgtattggacctgatgcaaacccctgctcacactttggtgggagcactccttcgtactgccacttactatttcgctgacttagaggtggcagtgaagcacgagggaaacctcacctgggtgccgaacggggcgcctgaagcggcgttggacaacaccaccaacccaacagcttaccacaaggcaccactcacccgacttgcactgccttacacggcgccacaccgcgtgttggctactgtttacaacgggaacagcaagtatggtgacggcacggtggccaatgtgagaggtgatctgcaagtgttggcccagaaggcggcgagagcgctgcctacctccttcaactacggtgccattaaagctactcgggtgactgaactgctttaccgcatgaagagggctgagacatactgtccccggcctcttttggccattcacccggaccaggctagacacaagcagaagattgtggctccggtgaaacagcttctaaattttgacctgctcaaattggcgggagatgtggagtccaaccctgggcccagtggtgccccaccgaccgacttgcaaaagatggtcatgagcaacactaagcctgttgagctcatccttgacggtaagacggtggccatctgctgcgccaccggagtgtttggtactgcctacctcgtgcctcgtcaccttttcgcagaaaagtacgacaggatcatgttggacggcagggccatgacagacagtgactacagagtgtttgagtttgagattaaagtaaaaggacaggacatgctctcagacgctgcgctcatggtgctccaccgtggcaaccgtgtgagagacatcacgaaacactttcgtgatacagcaagaatgaagaaaggtacccccgttgtcggcgtgatcaacaacgccgaccctgggagaccgattttctccggtgaggccctcacctacaaggacattgtagtgtgcatggatggagacaccatgccgggcctatttgcctacagagccgctaccaaggctggctactgtggaggagccgttcttgccaaggacggagctgacacatttatcgtcggcactcactccgcaggaggcaatggagtcgggtactgctcatgcgtatctaggtccatgctcttgaagatgaaggcacacattgaccccgaaccacaccacgaggaattccacaagcaaaagatcattgcaccagcaaagcagcttctgaattttgacctgctcaagttggccggagacgttgagtccaacccaggaccaggagtcaaagttctgtttgccctgatctgcatcgctgtggccgaggccaagcccaccgagaacaacgaagacttcaacatcgtggccgtggccagcaacttcgcgaccacggatctcgatgctgaccgagggaagttgcccggcaagaagctgccgctggaggtgctcaaagagatggaagccaatgcccggaaagctggctgcaccaggggctgtctgatctgcctgtcccacatcaaatgcacgcccaagatgaagaagttcatcccaggacgctgccacacctacgaaggcgacaaagagtccgcacagggcggcataggcgaggcgatcgttgacattcctgagattcctgggttcaaggacttggagccaatggagcagttcatcgcacaggtcgatctgtgtgtggactgcacaactggctgcctcaaagggcttgccaacgtgcagtgttctgacctgctcaagaagtggctgccgcaacgctgtgcgacctttgccagcaagatccagggccaggtggacaagatcaagggggccggtggtgactaatctagagatatcagacatgataagatacattgatgagtttggacaaaccacaacaagaatgcagtgaaaaaaatgctttatttgtgaaatttgtgatgctattgctttatttgtaaccattataagctgcaataaacaagttaacaacaacaattgcattcattttatgtttcaggttcagggggagatgtgggaggttttttaaagcaagtaaaacctctacaaatgtggtaaatccgataaggatcgtcgactggctgcagtcggggaaatgtgcgcggaacccctatttgtttatttttctaaatacattcaaatatgtatccgctctcgagacaataaccctgataaatgcttcaataatattgaaaaaggaagagtatgagtattcaacatttcagagtggcccttattcccttttttgcagcattttgccttcctgtttttgctcacccagaaacactggtgaaagtaaaagatgctgaagaccagttgggtgccagagtgggttacattgaactggacctcaacagtggtaaaatccttgagagttttagacctgaagaaagatttccaatgatgagcacttttaaagtactgctatgtggtgctgtattatccagaattgatgcagggcaagagcaacttggtagaagaatacactattctcagaatgacttggttgagtactcaccagtcacagaaaagcatcttacagatggcatgacagtaagagaattatgcagtgctgccataaccatgagtgataacacagctgccaacttacttctgacaaccattggtggacctaaagagctaactgcttttttgcacaacatgggggaccatgtaactagacttgataggtgggaacctgagctgaatgaagccattccaaatgatgagagggacaccacaatgcctgtagcaatggcaacaactttgaggaaactattaactggtgaactacttactctagcttccagacaacaattaatagactggatggaggcagataaagttgcaggaccacttctgaggtcagccttacctgctggctggtttattgctgataaatctggagcaggtgagagagggtctaggggtatcattgcagcactggggccagatggtaagccctccagaattgtagttatctacacaacagggagtcaggcaactatggatgaaagaaatagacagatagctgagataggtgcctcactgattaagcattggtgagcatgcgaccaagtttactcatatatactttagattgatttaaaacttcatttttaatttaaaaggatctaggtgaagatcctttttgataatctcatgaccaaaatcccttaacgtgagttttcgttccactgagcggttaaccccgtagaaaagatcaaaggatcttcttgagatcctttttttctgcgcgtaatctgctgcttgcaaacaaaaaaaccaccgctaccagcggtggtttgtttgccggatcaagagctaccaactctttttccgaaggtaactggcttcagcagagcgcagataccaaatactgtccttctagtgtagccgtagttaggccaccacttcaagaactctgtagcaccgcctacatacctcgctctgctaatcctgttaccagtggctgctgccagtggcgataagtcgtgtcttaccgggttggactcaagacgatagttaccggataaggcgcagcggtcgggctgaacggggggttcgtgcacacagcccagcttggagcgaacgacctacaccgaactgagatacctacagcgtgagctatgagaaagcgccacgcttcccgaagggagaaaggcggacaggtatccggtaagcggcagggtcggaacaggagagcgcacgagggagcttccagggggaaacgcctggtatctttatagtcctgtcgggtttcgccacctctgacttgagcgtcgatttttgtgatgctcgtcaggggggcggagcctatggaaaaacgccagcaacgcggcctttttacggttcctggccttttgctggccttccactgcaatggccggccagatct

SEQ ID NO: 405 - DNA, 6674 bp, Artificial Sequence
  pJJP_O1P1-3C(WT)-GLuc(-1M)
tcaatattggccattagccatattattcattggttatatagcataaatcaatattggctattggccattgcatacgttgtatctatatcataatatgtacatttatattggctcatgtccaatatgaccgccatgttggcattgattattgactagttattaatagtaatcaattacggggtcattagttcatagcccatatatggagttccgcgttacataacttacggtaaatggcccgcctggctgaccgcccaacgacccccgcccattgacgtcaataatgacgtatgttcccatagtaacgccaatagggactttccattgacgtcaatgggtggagtatttacggtaaactgcccacttggcagtacatcaagtgtatcatatgccaagtccgccccctattgacgtcaatgacggtaaatggcccgcctggcattatgcccagtacatgaccttacgggactttcctacttggcagtacatctacgtattagtcatcgctattaccatggtgatgcggttttggcagtacaccaatgggcgtggatagcggtttgactcacggggatttccaagtctccaccccattgacgtcaatgggagtttgttttggcaccaaaatcaacgggactttccaaaatgtcgtaacaactgcgatcgcccgccccgttgacgcaaatgggcggtaggcgtgtacggtgggaggtctatataagcagagctcgtttagtgaaccgtcagatcactagaagctttattgcggtagtttatcacagttaaattgctaacgcagtcagtgcttctgacacaacagtctcgaagattaaacttaagtgactctattaaggtagccttgcagaagttggtcgtgaggcactgggcaggtaagtatcaaggttacaagacaggtttaaggagaccaatagaaactgggcttgtcgagacagagaagactcttgcgtttctgataggcacctattggtcttactgacatccactttgcctttctctccacagaatcgatattggatccgccgccaccatgggagccgggcaatccagcccggcaaccgggtcacagaaccaatcaggcaacactgggagcatcatcaacaattactacatgcagcagtaccaaaactctatggacacacaacttggtgacaacgctacaagcggaggctcaaacgaggggtccacggacacaacctccacccacacaaccaacactcagaacaacgactggttctcgaagctggctagctccgctttcagcggtcttttcggcgctcttctcgccgacaagaaaaccgaggagaccactcttcttgaggaccgcatcctcactactcgtaacggacacaccacctcgacaacccagtcgagcgtaggagtcacatacgggtatgcaacggctgaggatttcgtgagcgggccaaacacctctggtcttgagaccagggttgcccaggcagagcggttctttaaaacccacctgttcgactgggtcacaagtgacccgttcggacggtgccacctgctagaacttccaactgaccacaaaggtgtctatggcagcctgaccgactcgtatgcttatatgaggaacggctgggatgttgaagtcactgctgtgggaaatcagttcaatggaggatgcctgttggtggctatggtgccagaactttgctccatacagaagagggagctgtaccagctcacgctctttcctcaccagttcatcaaccctcggacgaacatgacagcacacatcactgtgccctttgttggcgtcaaccgttatgaccagtacaaggtacacaaaccttggaccctcgtggttatggttgtagcccccctgaccgtcaacagtgaaggtgccccgcaaatcaaggtgtatgccaacatcgcacctaccaacgtacacgtcgcgggtgaattcccttccaaagaggggatcttccctgtggcttgcagcgatggttatggcggtctggtgacaactgacccgaaaacggctgaccccgcttacgggaaagtgtttaaccccccccgcaacatgttgccggggcggttcaccaattttcttgacgtggctgaggcgtgccccacgtttctccacttcgagggtgacgtgccatacgtgaccacgaagacggattcagacagggtgctcgctcagttcgacttgtctttggcagcaaagcacatgtccaacaccttccttgcaggtctcgcccagtactacacacagtacagcggcaccatcaacctgcacttcatgttcacagggcctactgacgcgaaggcgcgttacatgattgcgtatgctcctcctggcatggaaccacctaaaacgccagaggcggctgcccactgcatccatgctgaatgggacacagggttgaactcaaaattcacattttcaatcccttacctttcggcggctgattacgcttacacagcgtctgacactgctgagaccacaaatgtacagggatgggtttgcctgtttcaaataacacacgggaaagctgacggcgacgcactggtcgttttggccagcgccggaaaggactttgagctgcgcctgccggtggatgctaggacccagactacctccgcgggcgagtcagcagaccccgtgaccgccaccgttgagaattacggtggcgagacacaggtccagaggcgccaacacacggacgtgtcatttatattagacagatttgtgaaagtgacaccaaaagaccaaattaatgtattggacctgatgcaaacccctgctcacactttggtgggagcactccttcgtactgccacttactatttcgctgacttagaggtggcagtgaagcacgagggaaacctcacctgggtgccgaacggggcgcctgaagcggcgttggacaacaccaccaacccaacagcttaccacaaggcaccactcacccgacttgcactgccttacacggcgccacaccgcgtgttggctactgtttacaacgggaacagcaagtatggtgacggcacggtggccaatgtgagaggtgatctgcaagtgttggcccagaaggcggcgagagcgctgcctacctccttcaactacggtgccattaaagctactcgggtgactgaactgctttaccgcatgaagagggctgagacatactgtccccggcctcttttggccattcacccggaccaggctagacacaagcagaagattgtggctccggtgaaacagcttctaaattttgacctgctcaaattggcgggagatgtggagtccaaccctgggcccagtggtgccccaccgaccgacttgcaaaagatggtcatgagcaacactaagcctgttgagctcatccttgacggtaagacggtggccatctgctgcgccaccggagtgtttggtactgcctacctcgtgcctcgtcaccttttcgcagaaaagtacgacaggatcatgttggacggcagggccatgacagacagtgactacagagtgtttgagtttgagattaaagtaaaaggacaggacatgctctcagacgctgcgctcatggtgctccaccgtggcaaccgtgtgagagacatcacgaaacactttcgtgatacagcaagaatgaagaaaggtacccccgttgtcggcgtgatcaacaacgccgacgttgggagactgattttctccggtgaggccctcacctacaaggacattgtagtgtgcatggatggagacaccatgccgggcctatttgcctacagagccgctaccaaggctggctactgtggaggagccgttcttgccaaggacggagctgacacatttatcgtcggcactcactccgcaggaggcaatggagtcgggtactgctcatgcgtatctaggtccatgctcttgaagatgaaggcacacattgaccccgaaccacaccacgaggaattccacaagcaaaagatcattgcaccagcaaagcagcttctgaattttgacctgctcaagttggccggagacgttgagtccaacccaggaccaggagtcaaagttctgtttgccctgatctgcatcgctgtggccgaggccaagcccaccgagaacaacgaagacttcaacatcgtggccgtggccagcaacttcgcgaccacggatctcgatgctgaccgagggaagttgcccggcaagaagctgccgctggaggtgctcaaagagatggaagccaatgcccggaaagctggctgcaccaggggctgtctgatctgcctgtcccacatcaaatgcacgcccaagatgaagaagttcatcccaggacgctgccacacctacgaaggcgacaaagagtccgcacagggcggcataggcgaggcgatcgttgacattcctgagattcctgggttcaaggacttggagccaatggagcagttcatcgcacaggtcgatctgtgtgtggactgcacaactggctgcctcaaagggcttgccaacgtgcagtgttctgacctgctcaagaagtggctgccgcaacgctgtgcgacctttgccagcaagatccagggccaggtggacaagatcaagggggccggtggtgactaatctagagatatcagacatgataagatacattgatgagtttggacaaaccacaacaagaatgcagtgaaaaaaatgctttatttgtgaaatttgtgatgctattgctttatttgtaaccattataagctgcaataaacaagttaacaacaacaattgcattcattttatgtttcaggttcagggggagatgtgggaggttttttaaagcaagtaaaacctctacaaatgtggtaaatccgataaggatcgtcgactggctgcagtcggggaaatgtgcgcggaacccctatttgtttatttttctaaatacattcaaatatgtatccgctctcgagacaataaccctgataaatgcttcaataatattgaaaaaggaagagtatgagtattcaacatttcagagtggcccttattcccttttttgcagcattttgccttcctgtttttgctcacccagaaacactggtgaaagtaaaagatgctgaagaccagttgggtgccagagtgggttacattgaactggacctcaacagtggtaaaatccttgagagttttagacctgaagaaagatttccaatgatgagcacttttaaagtactgctatgtggtgctgtattatccagaattgatgcagggcaagagcaacttggtagaagaatacactattctcagaatgacttggttgagtactcaccagtcacagaaaagcatcttacagatggcatgacagtaagagaattatgcagtgctgccataaccatgagtgataacacagctgccaacttacttctgacaaccattggtggacctaaagagctaactgcttttttgcacaacatgggggaccatgtaactagacttgataggtgggaacctgagctgaatgaagccattccaaatgatgagagggacaccacaatgcctgtagcaatggcaacaactttgaggaaactattaactggtgaactacttactctagcttccagacaacaattaatagactggatggaggcagataaagttgcaggaccacttctgaggtcagccttacctgctggctggtttattgctgataaatctggagcaggtgagagagggtctaggggtatcattgcagcactggggccagatggtaagccctccagaattgtagttatctacacaacagggagtcaggcaactatggatgaaagaaatagacagatagctgagataggtgcctcactgattaagcattggtgagcatgcgaccaagtttactcatatatactttagattgatttaaaacttcatttttaatttaaaaggatctaggtgaagatcctttttgataatctcatgaccaaaatcccttaacgtgagttttcgttccactgagcggttaaccccgtagaaaagatcaaaggatcttcttgagatcctttttttctgcgcgtaatctgctgcttgcaaacaaaaaaaccaccgctaccagcggtggtttgtttgccggatcaagagctaccaactctttttccgaaggtaactggcttcagcagagcgcagataccaaatactgtccttctagtgtagccgtagttaggccaccacttcaagaactctgtagcaccgcctacatacctcgctctgctaatcctgttaccagtggctgctgccagtggcgataagtcgtgtcttaccgggttggactcaagacgatagttaccggataaggcgcagcggtcgggctgaacggggggttcgtgcacacagcccagcttggagcgaacgacctacaccgaactgagatacctacagcgtgagctatgagaaagcgccacgcttcccgaagggagaaaggcggacaggtatccggtaagcggcagggtcggaacaggagagcgcacgagggagcttccagggggaaacgcctggtatctttatagtcctgtcgggtttcgccacctctgacttgagcgtcgatttttgtgatgctcgtcaggggggcggagcctatggaaaaacgccagcaacgcggcctttttacggttcctggccttttgctggccttccactgcaatggccggccagatct

SEQ ID NO: 406 - DNA, 6531 bp, Artificial Sequence
  pSNAP_3C(L23P)
aactacgtcaggtggcacttttcggggaaatgtgcgcggaacccctatttgtttatttttctaaatacattcaaatatgtatccgctcatgagacaataaccctgataaatgcttcaataatattgaaaaaggaagagtatgagtattcaacatttccgtgtcgcccttattcccttttttgcggcattttgccttcctgtttttgctcacccagaaacgctggtgaaagtaaaagatgctgaagatcagttgggtgcacgagtgggttacatcgaactggatctcaacagcggtaagatccttgagagttttcgccccgaagaacgtttcccaatgatgagcacttttaaagttctgctatgtggcgcggtattatcccgtgttgacgccgggcaagagcaactcggtcgccgcatacactattctcagaatgacttggttgagtactcaccagtcacagaaaagcatcttacggatggcatgacagtaagagaattatgcagtgctgccataaccatgagtgataacactgcggccaacttacttctgacaacgatcggaggaccgaaggagctaaccgcttttttgcacaacatgggggatcatgtaactcgccttgatcgttgggaaccggagctgaatgaagccataccaaacgacgagcgtgacaccacgatgcctgtagcaatggcaacaacgttgcgcaaactattaactggcgaactacttactctagcttcccggcaacaattaatagactggatggaggcggataaagttgcaggaccacttctgcgctcggcccttccggctggctggtttattgctgataaatctggagccggtgagcgtgggtctcgcggtatcattgcagcactggggccagatggtaagccctcccgtatcgtagttatctacacgacggggagtcaggcaactatggatgaacgaaatagacagatcgctgagataggtgcctcactgattaagcattggtaactgtcagaccaagtttactcatatatactttagattgatttaccccggttgataatcagaaaagccccaaaaacaggaagattgtataagcaaatatttaaattgtaaacgttaatattttgttaaaattcgcgttaaatttttgttaaatcagctcattttttaaccaataggccgaaatcggcaaaatcccttataaatcaaaagaatagcccgagatagggttgagtgttgttccagtttggaacaagagtccactattaaagaacgtggactccaacgtcaaagggcgaaaaaccgtctatcagggcgatggcccactacgtgaaccatcacccaaatcaagttttttggggtcgaggtgccgtaaagcactaaatcggaaccctaaagggagcccccgatttagagcttgacggggaaagccggcgaacgtggcgagaaaggaagggaagaaagcgaaaggagcgggcgctagggcgctggcaagtgtagcggtcacgctgcgcgtaaccaccacacccgccgcgcttaatgcgccgctacagggcgcgtaaaaggatctaggtgaagatcctttttgataatctcatgaccaaaatcccttaacgtgagttttcgttccactgagcgtcagaccccgtagaaaagatcaaaggatcttcttgagatcctttttttctgcgcgtaatctgctgcttgcaaacaaaaaaaccaccgctaccagcggtggtttgtttgccggatcaagagctaccaactctttttccgaaggtaactggcttcagcagagcgcagataccaaatactgtccttctagtgtagccgtagttaggccaccacttcaagaactctgtagcaccgcctacatacctcgctctgctaatcctgttaccagtggctgctgccagtggcgataagtcgtgtcttaccgggttggactcaagacgatagttaccggataaggcgcagcggtcgggctgaacggggggttcgtgcacacagcccagcttggagcgaacgacctacaccgaactgagatacctacagcgtgagctatgagaaagcgccacgcttcccgaagggagaaaggcggacaggtatccggtaagcggcagggtcggaacaggagagcgcacgagggagcttccagggggaaacgcctggtatctttatagtcctgtcgggtttcgccacctctgacttgagcgtcgatttttgtgatgctcgtcaggggggcggagcctatggaaaaacgccagcaacgcggcctttttacggttcctggccttttgctggccttttgctcacatgttctttcctgcgttatcccctgattctgtggataaccgtattaccgcctttgagtgagctgataccgctcgccgcagccgaacgaccgagcgcagcgagtcagtgagcgaggaagctatggtgcactctcagtacaatctgctctgatgccgcatagttaagccagtatacactccgctatcgctacgtgactgggtcatggctgcgccccgacacccgccaacacccgctgacgcgccctgacgggcttgtctgctcccggcatccgcttacagacaagctgtgaccgtctccgggagctgcatgtgtcagaggttttcaccgtcatcaccgaaacgcgcgaggcagctgcggtaaagctcatcagcgtggtcgtgcagcgattcacagatgtctgcctgttcatccgcgtccagctcgttgagtttctccagaagcgttaatgtctggcttctgataaagcgggccatgttaagggcggttttttcctgtttggtcactgatgcctccgtgtaagggggatttctgttcatgggggtaatgataccgatgaaacgagagaggatgctcacgatacgggttactgatgatgaacatgcccggttactggaacgttgtgagggtaaacaactggcggtatggatgcggcgggaccagagaaaaatcactcagggtcaatgccagccgaacgccagcaagacgtagcccagcgcgtcggccgccatgccggcgataatggcctgcttctcgccgaaacgtttggtggcgggaccagtgacgaaggcttgagcgagggcgtgcaagattccgaataccgcaagcgacaggccgatcatcgtcgcgctccagcgaaagcggtcctcgccgaaaatgacccagagcgctgccggcacctgtcctacgagttgcatgataaagaagacagtcataagtgcggcgacgatagtcatgccccgcgcccaccggaaggagctgactgggttgaaggctctcaagggcatcggtcgagatcccggtgcctaatgagtgagctaacttacattaattgcgttgcgctcactgcccgctttccagtcgggaaacctgtcgtgccagctgcattaatgaatcggccaacgcgcggggagaggcggtttgcgtattgggcgccagggtggtttttcttttcaccagtgagacgggcaacagctgattgcccttcaccgcctggccctgagagagttgcagcaagcggtccacgctggtttgccccagcaggcgaaaatcctgtttgatggtggttaacggcgggatataacatgagctgtcttcggtatcgtcgtatcccactaccgagatgtccgcaccaacgcgcagcccggactcggtaatggcgcgcattgcgcccagcgccatctgatcgttggcaaccagcatcgcagtgggaacgatgccctcattcagcatttgcatggtttgttgaaaaccggacatggcactccagtcgccttcccgttccgctatcggctgaatttgattgcgagtgagatatttatgccagccagccagacgcagacgcgccgagacagaacttaatgggcccgctaacagcgcgatttgctggtgacccaatgcgaccagatgctccacgcccagtcgcgtaccgtcttcatgggagaaaataatactgttgatgggtgtctggtcagagacatcaagaaataacgccggaacattagtgcaggcagcttccacagcaatggcatcctggtcatccagcggatagttaatgatcagcccactgacgcgttgcgcgagaagattgtgcaccgccgctttacaggcttcgacgccgcttcgttctaccatcgacaccaccacgctggcacccagttgatcggcgcgagatttaatcgccgcgacaatttgcgacggcgcgtgcagggccagactggaggtggcaacgccaatcagcaacgactgtttgcccgccagttgttgtgccacgcggttgggaatgtaattcagctccgccatcgccgcttccactttttcccgcgttttcgcagaaacgtggctggcctggttcaccacgcgggaaacggtctgataagagacaccggcatactctgcgacatcgtataacgttactggtttcacattcaccaccctgaattgactctcttccgggcgctatcatgccataccgcgaaaggttttgcgccattcgatggtgtccgggatctcgacgctctcccttatgcgactcctgcattaggaagcagcccagtagtaggttgaggccgttgagcaccgccgccgcaaggaatggtgcatgccggcatgccgccctttcgtcttcaagaattaattcccaattccccaggcatcaaataaaacgaaaggctcagtcgaaagactgggcctttcgttttatctgttgtttgtcggtgaacgctctcctgagtaggacaaatccgccgggagcggatttgaacgttgcgaagcaacggcccggagggtggcgggcaggacgcccgccataaactgccaggaattaattccccaggcatcaaataaaacgaaaggctcagtcgaaagactgggcctttcgttttatctgttgtttgtcggtgaacgctctcctgagtaggacaaatccgccgggagcggatttgaacgttgcgaagcaacggcccggagggtggcgggcaggacgcccgccataaactgccaggaattaattccccaggcatcaaataaaacgaaaggctcagtcgaaagactgggcctttcgttttatctgttgtttgtcggtgaacgctctcctgagtaggacaaatccgccgggagcggatttgaacgttgcgaagcaacggcccggagggtggcgggcaggacgcccgccataaactgccaggaattaattccccaggcatcaaataaaacgaaaggctcagtcgaaagactgggcctttcgttttatctgttgtttgtcggtgaacgctctcctgagtaggacaaatccgccgggagcggatttgaacgttgcgaagcaacggcccggagggtggcgggcaggacgcccgccataaactgccaggaattaattccccaggcatcaaataaaacgaaaggctcagtcgaaagactgggcctttcgttttatctgttgtttgtcggtgaacgctctcctgagtaggacaaatccgccgggagcggatttgaacgttgcgaagcaacggcccggagggtggcgggcaggacgcccgccataaactgccaggaattggggatcggaattaattcccggtttaaaccggggatctcgatcccgcgaaattaatacgactcactataggggaattgtgagcggataacaattcccctctagaaataattttgtttaactttaagaaggagatatacatatgagtggtgccccaccgaccgacttgcaaaagatggtcatgagcaacactaagcctgttgagctcatccctgacggtaagacggtggccatctgctgcgccaccggagtgtttggtactgcctacctcgtgcctcgtcaccttttcgcagaaaagtacgacaggatcatgttggacggcagggccatgacagacagtgactacagagtgtttgagtttgagattaaagtaaaaggacaggacatgctctcagacgctgcgctcatggtgctccaccgtggcaaccgtgtgagagacatcacgaaacactttcgtgatacagcaagaatgaagaaaggtacccccgttgtcggcgtgatcaacaacgccgacgttgggagactgattttctccggtgaggccctcacctacaaggacattgtagtgtgcatggatggagacaccatgccgggcctatttgcctacagagccgctaccaaggctggctactgtggaggagccgttcttgccaaggacggagctgacacatttatcgtcggcactcactccgcaggaggcaatggagtcgggtactgctcatgcgtatctaggtccatgctcttgaagatgaaggcacacattgaccccgaaccacaccacgagtagctcgaggttaattaagcggccgcattgatccggctgctaacaaagcccgaaaggaagctgagttggctgctgccaccgctgagcaataactagcataaccccttggggcctctaaacgggtcttgaggggttttttgctgaaaggaggaactatatccggat

SEQ ID NO: 407 - DNA, 6531 bp, Artificial Sequence
  pSNAP_3C(L42H)
aactacgtcaggtggcacttttcggggaaatgtgcgcggaacccctatttgtttatttttctaaatacattcaaatatgtatccgctcatgagacaataaccctgataaatgcttcaataatattgaaaaaggaagagtatgagtattcaacatttccgtgtcgcccttattcccttttttgcggcattttgccttcctgtttttgctcacccagaaacgctggtgaaagtaaaagatgctgaagatcagttgggtgcacgagtgggttacatcgaactggatctcaacagcggtaagatccttgagagttttcgccccgaagaacgtttcccaatgatgagcacttttaaagttctgctatgtggcgcggtattatcccgtgttgacgccgggcaagagcaactcggtcgccgcatacactattctcagaatgacttggttgagtactcaccagtcacagaaaagcatcttacggatggcatgacagtaagagaattatgcagtgctgccataaccatgagtgataacactgcggccaacttacttctgacaacgatcggaggaccgaaggagctaaccgcttttttgcacaacatgggggatcatgtaactcgccttgatcgttgggaaccggagctgaatgaagccataccaaacgacgagcgtgacaccacgatgcctgtagcaatggcaacaacgttgcgcaaactattaactggcgaactacttactctagcttcccggcaacaattaatagactggatggaggcggataaagttgcaggaccacttctgcgctcggcccttccggctggctggtttattgctgataaatctggagccggtgagcgtgggtctcgcggtatcattgcagcactggggccagatggtaagccctcccgtatcgtagttatctacacgacggggagtcaggcaactatggatgaacgaaatagacagatcgctgagataggtgcctcactgattaagcattggtaactgtcagaccaagtttactcatatatactttagattgatttaccccggttgataatcagaaaagccccaaaaacaggaagattgtataagcaaatatttaaattgtaaacgttaatattttgttaaaattcgcgttaaatttttgttaaatcagctcattttttaaccaataggccgaaatcggcaaaatcccttataaatcaaaagaatagcccgagatagggttgagtgttgttccagtttggaacaagagtccactattaaagaacgtggactccaacgtcaaagggcgaaaaaccgtctatcagggcgatggcccactacgtgaaccatcacccaaatcaagttttttggggtcgaggtgccgtaaagcactaaatcggaaccctaaagggagcccccgatttagagcttgacggggaaagccggcgaacgtggcgagaaaggaagggaagaaagcgaaaggagcgggcgctagggcgctggcaagtgtagcggtcacgctgcgcgtaaccaccacacccgccgcgcttaatgcgccgctacagggcgcgtaaaaggatctaggtgaagatcctttttgataatctcatgaccaaaatcccttaacgtgagttttcgttccactgagcgtcagaccccgtagaaaagatcaaaggatcttcttgagatcctttttttctgcgcgtaatctgctgcttgcaaacaaaaaaaccaccgctaccagcggtggtttgtttgccggatcaagagctaccaactctttttccgaaggtaactggcttcagcagagcgcagataccaaatactgtccttctagtgtagccgtagttaggccaccacttcaagaactctgtagcaccgcctacatacctcgctctgctaatcctgttaccagtggctgctgccagtggcgataagtcgtgtcttaccgggttggactcaagacgatagttaccggataaggcgcagcggtcgggctgaacggggggttcgtgcacacagcccagcttggagcgaacgacctacaccgaactgagatacctacagcgtgagctatgagaaagcgccacgcttcccgaagggagaaaggcggacaggtatccggtaagcggcagggtcggaacaggagagcgcacgagggagcttccagggggaaacgcctggtatctttatagtcctgtcgggtttcgccacctctgacttgagcgtcgatttttgtgatgctcgtcaggggggcggagcctatggaaaaacgccagcaacgcggcctttttacggttcctggccttttgctggccttttgctcacatgttctttcctgcgttatcccctgattctgtggataaccgtattaccgcctttgagtgagctgataccgctcgccgcagccgaacgaccgagcgcagcgagtcagtgagcgaggaagctatggtgcactctcagtacaatctgctctgatgccgcatagttaagccagtatacactccgctatcgctacgtgactgggtcatggctgcgccccgacacccgccaacacccgctgacgcgccctgacgggcttgtctgctcccggcatccgcttacagacaagctgtgaccgtctccgggagctgcatgtgtcagaggttttcaccgtcatcaccgaaacgcgcgaggcagctgcggtaaagctcatcagcgtggtcgtgcagcgattcacagatgtctgcctgttcatccgcgtccagctcgttgagtttctccagaagcgttaatgtctggcttctgataaagcgggccatgttaagggcggttttttcctgtttggtcactgatgcctccgtgtaagggggatttctgttcatgggggtaatgataccgatgaaacgagagaggatgctcacgatacgggttactgatgatgaacatgcccggttactggaacgttgtgagggtaaacaactggcggtatggatgcggcgggaccagagaaaaatcactcagggtcaatgccagccgaacgccagcaagacgtagcccagcgcgtcggccgccatgccggcgataatggcctgcttctcgccgaaacgtttggtggcgggaccagtgacgaaggcttgagcgagggcgtgcaagattccgaataccgcaagcgacaggccgatcatcgtcgcgctccagcgaaagcggtcctcgccgaaaatgacccagagcgctgccggcacctgtcctacgagttgcatgataaagaagacagtcataagtgcggcgacgatagtcatgccccgcgcccaccggaaggagctgactgggttgaaggctctcaagggcatcggtcgagatcccggtgcctaatgagtgagctaacttacattaattgcgttgcgctcactgcccgctttccagtcgggaaacctgtcgtgccagctgcattaatgaatcggccaacgcgcggggagaggcggtttgcgtattgggcgccagggtggtttttcttttcaccagtgagacgggcaacagctgattgcccttcaccgcctggccctgagagagttgcagcaagcggtccacgctggtttgccccagcaggcgaaaatcctgtttgatggtggttaacggcgggatataacatgagctgtcttcggtatcgtcgtatcccactaccgagatgtccgcaccaacgcgcagcccggactcggtaatggcgcgcattgcgcccagcgccatctgatcgttggcaaccagcatcgcagtgggaacgatgccctcattcagcatttgcatggtttgttgaaaaccggacatggcactccagtcgccttcccgttccgctatcggctgaatttgattgcgagtgagatatttatgccagccagccagacgcagacgcgccgagacagaacttaatgggcccgctaacagcgcgatttgctggtgacccaatgcgaccagatgctccacgcccagtcgcgtaccgtcttcatgggagaaaataatactgttgatgggtgtctggtcagagacatcaagaaataacgccggaacattagtgcaggcagcttccacagcaatggcatcctggtcatccagcggatagttaatgatcagcccactgacgcgttgcgcgagaagattgtgcaccgccgctttacaggcttcgacgccgcttcgttctaccatcgacaccaccacgctggcacccagttgatcggcgcgagatttaatcgccgcgacaatttgcgacggcgcgtgcagggccagactggaggtggcaacgccaatcagcaacgactgtttgcccgccagttgttgtgccacgcggttgggaatgtaattcagctccgccatcgccgcttccactttttcccgcgttttcgcagaaacgtggctggcctggttcaccacgcgggaaacggtctgataagagacaccggcatactctgcgacatcgtataacgttactggtttcacattcaccaccctgaattgactctcttccgggcgctatcatgccataccgcgaaaggttttgcgccattcgatggtgtccgggatctcgacgctctcccttatgcgactcctgcattaggaagcagcccagtagtaggttgaggccgttgagcaccgccgccgcaaggaatggtgcatgccggcatgccgccctttcgtcttcaagaattaattcccaattccccaggcatcaaataaaacgaaaggctcagtcgaaagactgggcctttcgttttatctgttgtttgtcggtgaacgctctcctgagtaggacaaatccgccgggagcggatttgaacgttgcgaagcaacggcccggagggtggcgggcaggacgcccgccataaactgccaggaattaattccccaggcatcaaataaaacgaaaggctcagtcgaaagactgggcctttcgttttatctgttgtttgtcggtgaacgctctcctgagtaggacaaatccgccgggagcggatttgaacgttgcgaagcaacggcccggagggtggcgggcaggacgcccgccataaactgccaggaattaattccccaggcatcaaataaaacgaaaggctcagtcgaaagactgggcctttcgttttatctgttgtttgtcggtgaacgctctcctgagtaggacaaatccgccgggagcggatttgaacgttgcgaagcaacggcccggagggtggcgggcaggacgcccgccataaactgccaggaattaattccccaggcatcaaataaaacgaaaggctcagtcgaaagactgggcctttcgttttatctgttgtttgtcggtgaacgctctcctgagtaggacaaatccgccgggagcggatttgaacgttgcgaagcaacggcccggagggtggcgggcaggacgcccgccataaactgccaggaattaattccccaggcatcaaataaaacgaaaggctcagtcgaaagactgggcctttcgttttatctgttgtttgtcggtgaacgctctcctgagtaggacaaatccgccgggagcggatttgaacgttgcgaagcaacggcccggagggtggcgggcaggacgcccgccataaactgccaggaattggggatcggaattaattcccggtttaaaccggggatctcgatcccgcgaaattaatacgactcactataggggaattgtgagcggataacaattcccctctagaaataattttgtttaactttaagaaggagatatacatatgagtggtgccccaccgaccgacttgcaaaagatggtcatgagcaacactaagcctgttgagctcatccttgacggtaagacggtggccatctgctgcgccaccggagtgtttggtactgcctaccacgtgcctcgtcaccttttcgcagaaaagtacgacaggatcatgttggacggcagggccatgacagacagtgactacagagtgtttgagtttgagattaaagtaaaaggacaggacatgctctcagacgctgcgctcatggtgctccaccgtggcaaccgtgtgagagacatcacgaaacactttcgtgatacagcaagaatgaagaaaggtacccccgttgtcggcgtgatcaacaacgccgacgttgggagactgattttctccggtgaggccctcacctacaaggacattgtagtgtgcatggatggagacaccatgccgggcctatttgcctacagagccgctaccaaggctggctactgtggaggagccgttcttgccaaggacggagctgacacatttatcgtcggcactcactccgcaggaggcaatggagtcgggtactgctcatgcgtatctaggtccatgctcttgaagatgaaggcacacattgaccccgaaccacaccacgagtagctcgaggttaattaagcggccgcattgatccggctgctaacaaagcccgaaaggaagctgagttggctgctgccaccgctgagcaataactagcataaccccttggggcctctaaacgggtcttgaggggttttttgctgaaaggaggaactatatccggat

SEQ ID NO: 408 - DNA, 6531 bp, Artificial Sequence
  pSNAP_3C(T100P)
aactacgtcaggtggcacttttcggggaaatgtgcgcggaacccctatttgtttatttttctaaatacattcaaatatgtatccgctcatgagacaataaccctgataaatgcttcaataatattgaaaaaggaagagtatgagtattcaacatttccgtgtcgcccttattcccttttttgcggcattttgccttcctgtttttgctcacccagaaacgctggtgaaagtaaaagatgctgaagatcagttgggtgcacgagtgggttacatcgaactggatctcaacagcggtaagatccttgagagttttcgccccgaagaacgtttcccaatgatgagcacttttaaagttctgctatgtggcgcggtattatcccgtgttgacgccgggcaagagcaactcggtcgccgcatacactattctcagaatgacttggttgagtactcaccagtcacagaaaagcatcttacggatggcatgacagtaagagaattatgcagtgctgccataaccatgagtgataacactgcggccaacttacttctgacaacgatcggaggaccgaaggagctaaccgcttttttgcacaacatgggggatcatgtaactcgccttgatcgttgggaaccggagctgaatgaagccataccaaacgacgagcgtgacaccacgatgcctgtagcaatggcaacaacgttgcgcaaactattaactggcgaactacttactctagcttcccggcaacaattaatagactggatggaggcggataaagttgcaggaccacttctgcgctcggcccttccggctggctggtttattgctgataaatctggagccggtgagcgtgggtctcgcggtatcattgcagcactggggccagatggtaagccctcccgtatcgtagttatctacacgacggggagtcaggcaactatggatgaacgaaatagacagatcgctgagataggtgcctcactgattaagcattggtaactgtcagaccaagtttactcatatatactttagattgatttaccccggttgataatcagaaaagccccaaaaacaggaagattgtataagcaaatatttaaattgtaaacgttaatattttgttaaaattcgcgttaaatttttgttaaatcagctcattttttaaccaataggccgaaatcggcaaaatcccttataaatcaaaagaatagcccgagatagggttgagtgttgttccagtttggaacaagagtccactattaaagaacgtggactccaacgtcaaagggcgaaaaaccgtctatcagggcgatggcccactacgtgaaccatcacccaaatcaagttttttggggtcgaggtgccgtaaagcactaaatcggaaccctaaagggagcccccgatttagagcttgacggggaaagccggcgaacgtggcgagaaaggaagggaagaaagcgaaaggagcgggcgctagggcgctggcaagtgtagcggtcacgctgcgcgtaaccaccacacccgccgcgcttaatgcgccgctacagggcgcgtaaaaggatctaggtgaagatcctttttgataatctcatgaccaaaatcccttaacgtgagttttcgttccactgagcgtcagaccccgtagaaaagatcaaaggatcttcttgagatcctttttttctgcgcgtaatctgctgcttgcaaacaaaaaaaccaccgctaccagcggtggtttgtttgccggatcaagagctaccaactctttttccgaaggtaactggcttcagcagagcgcagataccaaatactgtccttctagtgtagccgtagttaggccaccacttcaagaactctgtagcaccgcctacatacctcgctctgctaatcctgttaccagtggctgctgccagtggcgataagtcgtgtcttaccgggttggactcaagacgatagttaccggataaggcgcagcggtcgggctgaacggggggttcgtgcacacagcccagcttggagcgaacgacctacaccgaactgagatacctacagcgtgagctatgagaaagcgccacgcttcccgaagggagaaaggcggacaggtatccggtaagcggcagggtcggaacaggagagcgcacgagggagcttccagggggaaacgcctggtatctttatagtcctgtcgggtttcgccacctctgacttgagcgtcgatttttgtgatgctcgtcaggggggcggagcctatggaaaaacgccagcaacgcggcctttttacggttcctggccttttgctggccttttgctcacatgttctttcctgcgttatcccctgattctgtggataaccgtattaccgcctttgagtgagctgataccgctcgccgcagccgaacgaccgagcgcagcgagtcagtgagcgaggaagctatggtgcactctcagtacaatctgctctgatgccgcatagttaagccagtatacactccgctatcgctacgtgactgggtcatggctgcgccccgacacccgccaacacccgctgacgcgccctgacgggcttgtctgctcccggcatccgcttacagacaagctgtgaccgtctccgggagctgcatgtgtcagaggttttcaccgtcatcaccgaaacgcgcgaggcagctgcggtaaagctcatcagcgtggtcgtgcagcgattcacagatgtctgcctgttcatccgcgtccagctcgttgagtttctccagaagcgttaatgtctggcttctgataaagcgggccatgttaagggcggttttttcctgtttggtcactgatgcctccgtgtaagggggatttctgttcatgggggtaatgataccgatgaaacgagagaggatgctcacgatacgggttactgatgatgaacatgcccggttactggaacgttgtgagggtaaacaactggcggtatggatgcggcgggaccagagaaaaatcactcagggtcaatgccagccgaacgccagcaagacgtagcccagcgcgtcggccgccatgccggcgataatggcctgcttctcgccgaaacgtttggtggcgggaccagtgacgaaggcttgagcgagggcgtgcaagattccgaataccgcaagcgacaggccgatcatcgtcgcgctccagcgaaagcggtcctcgccgaaaatgacccagagcgctgccggcacctgtcctacgagttgcatgataaagaagacagtcataagtgcggcgacgatagtcatgccccgcgcccaccggaaggagctgactgggttgaaggctctcaagggcatcggtcgagatcccggtgcctaatgagtgagctaacttacattaattgcgttgcgctcactgcccgctttccagtcgggaaacctgtcgtgccagctgcattaatgaatcggccaacgcgcggggagaggcggtttgcgtattgggcgccagggtggtttttcttttcaccagtgagacgggcaacagctgattgcccttcaccgcctggccctgagagagttgcagcaagcggtccacgctggtttgccccagcaggcgaaaatcctgtttgatggtggttaacggcgggatataacatgagctgtcttcggtatcgtcgtatcccactaccgagatgtccgcaccaacgcgcagcccggactcggtaatggcgcgcattgcgcccagcgccatctgatcgttggcaaccagcatcgcagtgggaacgatgccctcattcagcatttgcatggtttgttgaaaaccggacatggcactccagtcgccttcccgttccgctatcggctgaatttgattgcgagtgagatatttatgccagccagccagacgcagacgcgccgagacagaacttaatgggcccgctaacagcgcgatttgctggtgacccaatgcgaccagatgctccacgcccagtcgcgtaccgtcttcatgggagaaaataatactgttgatgggtgtctggtcagagacatcaagaaataacgccggaacattagtgcaggcagcttccacagcaatggcatcctggtcatccagcggatagttaatgatcagcccactgacgcgttgcgcgagaagattgtgcaccgccgctttacaggcttcgacgccgcttcgttctaccatcgacaccaccacgctggcacccagttgatcggcgcgagatttaatcgccgcgacaatttgcgacggcgcgtgcagggccagactggaggtggcaacgccaatcagcaacgactgtttgcccgccagttgttgtgccacgcggttgggaatgtaattcagctccgccatcgccgcttccactttttcccgcgttttcgcagaaacgtggctggcctggttcaccacgcgggaaacggtctgataagagacaccggcatactctgcgacatcgtataacgttactggtttcacattcaccaccctgaattgactctcttccgggcgctatcatgccataccgcgaaaggttttgcgccattcgatggtgtccgggatctcgacgctctcccttatgcgactcctgcattaggaagcagcccagtagtaggttgaggccgttgagcaccgccgccgcaaggaatggtgcatgccggcatgccgccctttcgtcttcaagaattaattcccaattccccaggcatcaaataaaacgaaaggctcagtcgaaagactgggcctttcgttttatctgttgtttgtcggtgaacgctctcctgagtaggacaaatccgccgggagcggatttgaacgttgcgaagcaacggcccggagggtggcgggcaggacgcccgccataaactgccaggaattaattccccaggcatcaaataaaacgaaaggctcagtcgaaagactgggcctttcgttttatctgttgtttgtcggtgaacgctctcctgagtaggacaaatccgccgggagcggatttgaacgttgcgaagcaacggcccggagggtggcgggcaggacgcccgccataaactgccaggaattaattccccaggcatcaaataaaacgaaaggctcagtcgaaagactgggcctttcgttttatctgttgtttgtcggtgaacgctctcctgagtaggacaaatccgccgggagcggatttgaacgttgcgaagcaacggcccggagggtggcgggcaggacgcccgccataaactgccaggaattaattccccaggcatcaaataaaacgaaaggctcagtcgaaagactgggcctttcgttttatctgttgtttgtcggtgaacgctctcctgagtaggacaaatccgccgggagcggatttgaacgttgcgaagcaacggcccggagggtggcgggcaggacgcccgccataaactgccaggaattaattccccaggcatcaaataaaacgaaaggctcagtcgaaagactgggcctttcgttttatctgttgtttgtcggtgaacgctctcctgagtaggacaaatccgccgggagcggatttgaacgttgcgaagcaacggcccggagggtggcgggcaggacgcccgccataaactgccaggaattggggatcggaattaattcccggtttaaaccggggatctcgatcccgcgaaattaatacgactcactataggggaattgtgagcggataacaattcccctctagaaataattttgtttaactttaagaaggagatatacatatgagtggtgccccaccgaccgacttgcaaaagatggtcatgagcaacactaagcctgttgagctcatccttgacggtaagacggtggccatctgctgcgccaccggagtgtttggtactgcctacctcgtgcctcgtcaccttttcgcagaaaagtacgacaggatcatgttggacggcagggccatgacagacagtgactacagagtgtttgagtttgagattaaagtaaaaggacaggacatgctctcagacgctgcgctcatggtgctccaccgtggcaaccgtgtgagagacatcccgaaacactttcgtgatacagcaagaatgaagaaaggtacccccgttgtcggcgtgatcaacaacgccgacgttgggagactgattttctccggtgaggccctcacctacaaggacattgtagtgtgcatggatggagacaccatgccgggcctatttgcctacagagccgctaccaaggctggctactgtggaggagccgttcttgccaaggacggagctgacacatttatcgtcggcactcactccgcaggaggcaatggagtcgggtactgctcatgcgtatctaggtccatgctcttgaagatgaaggcacacattgaccccgaaccacaccacgagtagctcgaggttaattaagcggccgcattgatccggctgctaacaaagcccgaaaggaagctgagttggctgctgccaccgctgagcaataactagcataaccccttggggcctctaaacgggtcttgaggggttttttgctgaaaggaggaactatatccggat

SEQ ID NO: 409 - DNA, 6531 bp, Artificial Sequence
  pSNAP_3C(WT)
aactacgtcaggtggcacttttcggggaaatgtgcgcggaacccctatttgtttatttttctaaatacattcaaatatgtatccgctcatgagacaataaccctgataaatgcttcaataatattgaaaaaggaagagtatgagtattcaacatttccgtgtcgcccttattcccttttttgcggcattttgccttcctgtttttgctcacccagaaacgctggtgaaagtaaaagatgctgaagatcagttgggtgcacgagtgggttacatcgaactggatctcaacagcggtaagatccttgagagttttcgccccgaagaacgtttcccaatgatgagcacttttaaagttctgctatgtggcgcggtattatcccgtgttgacgccgggcaagagcaactcggtcgccgcatacactattctcagaatgacttggttgagtactcaccagtcacagaaaagcatcttacggatggcatgacagtaagagaattatgcagtgctgccataaccatgagtgataacactgcggccaacttacttctgacaacgatcggaggaccgaaggagctaaccgcttttttgcacaacatgggggatcatgtaactcgccttgatcgttgggaaccggagctgaatgaagccataccaaacgacgagcgtgacaccacgatgcctgtagcaatggcaacaacgttgcgcaaactattaactggcgaactacttactctagcttcccggcaacaattaatagactggatggaggcggataaagttgcaggaccacttctgcgctcggcccttccggctggctggtttattgctgataaatctggagccggtgagcgtgggtctcgcggtatcattgcagcactggggccagatggtaagccctcccgtatcgtagttatctacacgacggggagtcaggcaactatggatgaacgaaatagacagatcgctgagataggtgcctcactgattaagcattggtaactgtcagaccaagtttactcatatatactttagattgatttaccccggttgataatcagaaaagccccaaaaacaggaagattgtataagcaaatatttaaattgtaaacgttaatattttgttaaaattcgcgttaaatttttgttaaatcagctcattttttaaccaataggccgaaatcggcaaaatcccttataaatcaaaagaatagcccgagatagggttgagtgttgttccagtttggaacaagagtccactattaaagaacgtggactccaacgtcaaagggcgaaaaaccgtctatcagggcgatggcccactacgtgaaccatcacccaaatcaagttttttggggtcgaggtgccgtaaagcactaaatcggaaccctaaagggagcccccgatttagagcttgacggggaaagccggcgaacgtggcgagaaaggaagggaagaaagcgaaaggagcgggcgctagggcgctggcaagtgtagcggtcacgctgcgcgtaaccaccacacccgccgcgcttaatgcgccgctacagggcgcgtaaaaggatctaggtgaagatcctttttgataatctcatgaccaaaatcccttaacgtgagttttcgttccactgagcgtcagaccccgtagaaaagatcaaaggatcttcttgagatcctttttttctgcgcgtaatctgctgcttgcaaacaaaaaaaccaccgctaccagcggtggtttgtttgccggatcaagagctaccaactctttttccgaaggtaactggcttcagcagagcgcagataccaaatactgtccttctagtgtagccgtagttaggccaccacttcaagaactctgtagcaccgcctacatacctcgctctgctaatcctgttaccagtggctgctgccagtggcgataagtcgtgtcttaccgggttggactcaagacgatagttaccggataaggcgcagcggtcgggctgaacggggggttcgtgcacacagcccagcttggagcgaacgacctacaccgaactgagatacctacagcgtgagctatgagaaagcgccacgcttcccgaagggagaaaggcggacaggtatccggtaagcggcagggtcggaacaggagagcgcacgagggagcttccagggggaaacgcctggtatctttatagtcctgtcgggtttcgccacctctgacttgagcgtcgatttttgtgatgctcgtcaggggggcggagcctatggaaaaacgccagcaacgcggcctttttacggttcctggccttttgctggccttttgctcacatgttctttcctgcgttatcccctgattctgtggataaccgtattaccgcctttgagtgagctgataccgctcgccgcagccgaacgaccgagcgcagcgagtcagtgagcgaggaagctatggtgcactctcagtacaatctgctctgatgccgcatagttaagccagtatacactccgctatcgctacgtgactgggtcatggctgcgccccgacacccgccaacacccgctgacgcgccctgacgggcttgtctgctcccggcatccgcttacagacaagctgtgaccgtctccgggagctgcatgtgtcagaggttttcaccgtcatcaccgaaacgcgcgaggcagctgcggtaaagctcatcagcgtggtcgtgcagcgattcacagatgtctgcctgttcatccgcgtccagctcgttgagtttctccagaagcgttaatgtctggcttctgataaagcgggccatgttaagggcggttttttcctgtttggtcactgatgcctccgtgtaagggggatttctgttcatgggggtaatgataccgatgaaacgagagaggatgctcacgatacgggttactgatgatgaacatgcccggttactggaacgttgtgagggtaaacaactggcggtatggatgcggcgggaccagagaaaaatcactcagggtcaatgccagccgaacgccagcaagacgtagcccagcgcgtcggccgccatgccggcgataatggcctgcttctcgccgaaacgtttggtggcgggaccagtgacgaaggcttgagcgagggcgtgcaagattccgaataccgcaagcgacaggccgatcatcgtcgcgctccagcgaaagcggtcctcgccgaaaatgacccagagcgctgccggcacctgtcctacgagttgcatgataaagaagacagtcataagtgcggcgacgatagtcatgccccgcgcccaccggaaggagctgactgggttgaaggctctcaagggcatcggtcgagatcccggtgcctaatgagtgagctaacttacattaattgcgttgcgctcactgcccgctttccagtcgggaaacctgtcgtgccagctgcattaatgaatcggccaacgcgcggggagaggcggtttgcgtattgggcgccagggtggtttttcttttcaccagtgagacgggcaacagctgattgcccttcaccgcctggccctgagagagttgcagcaagcggtccacgctggtttgccccagcaggcgaaaatcctgtttgatggtggttaacggcgggatataacatgagctgtcttcggtatcgtcgtatcccactaccgagatgtccgcaccaacgcgcagcccggactcggtaatggcgcgcattgcgcccagcgccatctgatcgttggcaaccagcatcgcagtgggaacgatgccctcattcagcatttgcatggtttgttgaaaaccggacatggcactccagtcgccttcccgttccgctatcggctgaatttgattgcgagtgagatatttatgccagccagccagacgcagacgcgccgagacagaacttaatgggcccgctaacagcgcgatttgctggtgacccaatgcgaccagatgctccacgcccagtcgcgtaccgtcttcatgggagaaaataatactgttgatgggtgtctggtcagagacatcaagaaataacgccggaacattagtgcaggcagcttccacagcaatggcatcctggtcatccagcggatagttaatgatcagcccactgacgcgttgcgcgagaagattgtgcaccgccgctttacaggcttcgacgccgcttcgttctaccatcgacaccaccacgctggcacccagttgatcggcgcgagatttaatcgccgcgacaatttgcgacggcgcgtgcagggccagactggaggtggcaacgccaatcagcaacgactgtttgcccgccagttgttgtgccacgcggttgggaatgtaattcagctccgccatcgccgcttccactttttcccgcgttttcgcagaaacgtggctggcctggttcaccacgcgggaaacggtctgataagagacaccggcatactctgcgacatcgtataacgttactggtttcacattcaccaccctgaattgactctcttccgggcgctatcatgccataccgcgaaaggttttgcgccattcgatggtgtccgggatctcgacgctctcccttatgcgactcctgcattaggaagcagcccagtagtaggttgaggccgttgagcaccgccgccgcaaggaatggtgcatgccggcatgccgccctttcgtcttcaagaattaattcccaattccccaggcatcaaataaaacgaaaggctcagtcgaaagactgggcctttcgttttatctgttgtttgtcggtgaacgctctcctgagtaggacaaatccgccgggagcggatttgaacgttgcgaagcaacggcccggagggtggcgggcaggacgcccgccataaactgccaggaattaattccccaggcatcaaataaaacgaaaggctcagtcgaaagactgggcctttcgttttatctgttgtttgtcggtgaacgctctcctgagtaggacaaatccgccgggagcggatttgaacgttgcgaagcaacggcccggagggtggcgggcaggacgcccgccataaactgccaggaattaattccccaggcatcaaataaaacgaaaggctcagtcgaaagactgggcctttcgttttatctgttgtttgtcggtgaacgctctcctgagtaggacaaatccgccgggagcggatttgaacgttgcgaagcaacggcccggagggtggcgggcaggacgcccgccataaactgccaggaattaattccccaggcatcaaataaaacgaaaggctcagtcgaaagactgggcctttcgttttatctgttgtttgtcggtgaacgctctcctgagtaggacaaatccgccgggagcggatttgaacgttgcgaagcaacggcccggagggtggcgggcaggacgcccgccataaactgccaggaattaattccccaggcatcaaataaaacgaaaggctcagtcgaaagactgggcctttcgttttatctgttgtttgtcggtgaacgctctcctgagtaggacaaatccgccgggagcggatttgaacgttgcgaagcaacggcccggagggtggcgggcaggacgcccgccataaactgccaggaattggggatcggaattaattcccggtttaaaccggggatctcgatcccgcgaaattaatacgactcactataggggaattgtgagcggataacaattcccctctagaaataattttgtttaactttaagaaggagatatacatatgagtggtgccccaccgaccgacttgcaaaagatggtcatgagcaacactaagcctgttgagctcatccttgacggtaagacggtggccatctgctgcgccaccggagtgtttggtactgcctacctcgtgcctcgtcaccttttcgcagaaaagtacgacaggatcatgttggacggcagggccatgacagacagtgactacagagtgtttgagtttgagattaaagtaaaaggacaggacatgctctcagacgctgcgctcatggtgctccaccgtggcaaccgtgtgagagacatcacgaaacactttcgtgatacagcaagaatgaagaaaggtacccccgttgtcggcgtgatcaacaacgccgacgttgggagactgattttctccggtgaggccctcacctacaaggacattgtagtgtgcatggatggagacaccatgccgggcctatttgcctacagagccgctaccaaggctggctactgtggaggagccgttcttgccaaggacggagctgacacatttatcgtcggcactcactccgcaggaggcaatggagtcgggtactgctcatgcgtatctaggtccatgctcttgaagatgaaggcacacattgaccccgaaccacaccacgagtagctcgaggttaattaagcggccgcattgatccggctgctaacaaagcccgaaaggaagctgagttggctgctgccaccgctgagcaataactagcataaccccttggggcctctaaacgggtcttgaggggttttttgctgaaaggaggaactatatccggat

SEQ ID NO: 410 - DNA, 6590 bp, Artificial Sequence
  pSNAP_Flag-3C(L127P)
aactacgtcaggtggcacttttcggggaaatgtgcgcggaacccctatttgtttatttttctaaatacattcaaatatgtatccgctcatgagacaataaccctgataaatgcttcaataatattgaaaaaggaagagtatgagtattcaacatttccgtgtcgcccttattcccttttttgcggcattttgccttcctgtttttgctcacccagaaacgctggtgaaagtaaaagatgctgaagatcagttgggtgcacgagtgggttacatcgaactggatctcaacagcggtaagatccttgagagttttcgccccgaagaacgtttcccaatgatgagcacttttaaagttctgctatgtggcgcggtattatcccgtgttgacgccgggcaagagcaactcggtcgccgcatacactattctcagaatgacttggttgagtactcaccagtcacagaaaagcatcttacggatggcatgacagtaagagaattatgcagtgctgccataaccatgagtgataacactgcggccaacttacttctgacaacgatcggaggaccgaaggagctaaccgcttttttgcacaacatgggggatcatgtaactcgccttgatcgttgggaaccggagctgaatgaagccataccaaacgacgagcgtgacaccacgatgcctgtagcaatggcaacaacgttgcgcaaactattaactggcgaactacttactctagcttcccggcaacaattaatagactggatggaggcggataaagttgcaggaccacttctgcgctcggcccttccggctggctggtttattgctgataaatctggagccggtgagcgtgggtctcgcggtatcattgcagcactggggccagatggtaagccctcccgtatcgtagttatctacacgacggggagtcaggcaactatggatgaacgaaatagacagatcgctgagataggtgcctcactgattaagcattggtaactgtcagaccaagtttactcatatatactttagattgatttaccccggttgataatcagaaaagccccaaaaacaggaagattgtataagcaaatatttaaattgtaaacgttaatattttgttaaaattcgcgttaaatttttgttaaatcagctcattttttaaccaataggccgaaatcggcaaaatcccttataaatcaaaagaatagcccgagatagggttgagtgttgttccagtttggaacaagagtccactattaaagaacgtggactccaacgtcaaagggcgaaaaaccgtctatcagggcgatggcccactacgtgaaccatcacccaaatcaagttttttggggtcgaggtgccgtaaagcactaaatcggaaccctaaagggagcccccgatttagagcttgacggggaaagccggcgaacgtggcgagaaaggaagggaagaaagcgaaaggagcgggcgctagggcgctggcaagtgtagcggtcacgctgcgcgtaaccaccacacccgccgcgcttaatgcgccgctacagggcgcgtaaaaggatctaggtgaagatcctttttgataatctcatgaccaaaatcccttaacgtgagttttcgttccactgagcgtcagaccccgtagaaaagatcaaaggatcttcttgagatcctttttttctgcgcgtaatctgctgcttgcaaacaaaaaaaccaccgctaccagcggtggtttgtttgccggatcaagagctaccaactctttttccgaaggtaactggcttcagcagagcgcagataccaaatactgtccttctagtgtagccgtagttaggccaccacttcaagaactctgtagcaccgcctacatacctcgctctgctaatcctgttaccagtggctgctgccagtggcgataagtcgtgtcttaccgggttggactcaagacgatagttaccggataaggcgcagcggtcgggctgaacggggggttcgtgcacacagcccagcttggagcgaacgacctacaccgaactgagatacctacagcgtgagctatgagaaagcgccacgcttcccgaagggagaaaggcggacaggtatccggtaagcggcagggtcggaacaggagagcgcacgagggagcttccagggggaaacgcctggtatctttatagtcctgtcgggtttcgccacctctgacttgagcgtcgatttttgtgatgctcgtcaggggggcggagcctatggaaaaacgccagcaacgcggcctttttacggttcctggccttttgctggccttttgctcacatgttctttcctgcgttatcccctgattctgtggataaccgtattaccgcctttgagtgagctgataccgctcgccgcagccgaacgaccgagcgcagcgagtcagtgagcgaggaagctatggtgcactctcagtacaatctgctctgatgccgcatagttaagccagtatacactccgctatcgctacgtgactgggtcatggctgcgccccgacacccgccaacacccgctgacgcgccctgacgggcttgtctgctcccggcatccgcttacagacaagctgtgaccgtctccgggagctgcatgtgtcagaggttttcaccgtcatcaccgaaacgcgcgaggcagctgcggtaaagctcatcagcgtggtcgtgcagcgattcacagatgtctgcctgttcatccgcgtccagctcgttgagtttctccagaagcgttaatgtctggcttctgataaagcgggccatgttaagggcggttttttcctgtttggtcactgatgcctccgtgtaagggggatttctgttcatgggggtaatgataccgatgaaacgagagaggatgctcacgatacgggttactgatgatgaacatgcccggttactggaacgttgtgagggtaaacaactggcggtatggatgcggcgggaccagagaaaaatcactcagggtcaatgccagccgaacgccagcaagacgtagcccagcgcgtcggccgccatgccggcgataatggcctgcttctcgccgaaacgtttggtggcgggaccagtgacgaaggcttgagcgagggcgtgcaagattccgaataccgcaagcgacaggccgatcatcgtcgcgctccagcgaaagcggtcctcgccgaaaatgacccagagcgctgccggcacctgtcctacgagttgcatgataaagaagacagtcataagtgcggcgacgatagtcatgccccgcgcccaccggaaggagctgactgggttgaaggctctcaagggcatcggtcgagatcccggtgcctaatgagtgagctaacttacattaattgcgttgcgctcactgcccgctttccagtcgggaaacctgtcgtgccagctgcattaatgaatcggccaacgcgcggggagaggcggtttgcgtattgggcgccagggtggtttttcttttcaccagtgagacgggcaacagctgattgcccttcaccgcctggccctgagagagttgcagcaagcggtccacgctggtttgccccagcaggcgaaaatcctgtttgatggtggttaacggcgggatataacatgagctgtcttcggtatcgtcgtatcccactaccgagatgtccgcaccaacgcgcagcccggactcggtaatggcgcgcattgcgcccagcgccatctgatcgttggcaaccagcatcgcagtgggaacgatgccctcattcagcatttgcatggtttgttgaaaaccggacatggcactccagtcgccttcccgttccgctatcggctgaatttgattgcgagtgagatatttatgccagccagccagacgcagacgcgccgagacagaacttaatgggcccgctaacagcgcgatttgctggtgacccaatgcgaccagatgctccacgcccagtcgcgtaccgtcttcatgggagaaaataatactgttgatgggtgtctggtcagagacatcaagaaataacgccggaacattagtgcaggcagcttccacagcaatggcatcctggtcatccagcggatagttaatgatcagcccactgacgcgttgcgcgagaagattgtgcaccgccgctttacaggcttcgacgccgcttcgttctaccatcgacaccaccacgctggcacccagttgatcggcgcgagatttaatcgccgcgacaatttgcgacggcgcgtgcagggccagactggaggtggcaacgccaatcagcaacgactgtttgcccgccagttgttgtgccacgcggttgggaatgtaattcagctccgccatcgccgcttccactttttcccgcgttttcgcagaaacgtggctggcctggttcaccacgcgggaaacggtctgataagagacaccggcatactctgcgacatcgtataacgttactggtttcacattcaccaccctgaattgactctcttccgggcgctatcatgccataccgcgaaaggttttgcgccattcgatggtgtccgggatctcgacgctctcccttatgcgactcctgcattaggaagcagcccagtagtaggttgaggccgttgagcaccgccgccgcaaggaatggtgcatgccggcatgccgccctttcgtcttcaagaattaattcccaattccccaggcatcaaataaaacgaaaggctcagtcgaaagactgggcctttcgttttatctgttgtttgtcggtgaacgctctcctgagtaggacaaatccgccgggagcggatttgaacgttgcgaagcaacggcccggagggtggcgggcaggacgcccgccataaactgccaggaattaattccccaggcatcaaataaaacgaaaggctcagtcgaaagactgggcctttcgttttatctgttgtttgtcggtgaacgctctcctgagtaggacaaatccgccgggagcggatttgaacgttgcgaagcaacggcccggagggtggcgggcaggacgcccgccataaactgccaggaattaattccccaggcatcaaataaaacgaaaggctcagtcgaaagactgggcctttcgttttatctgttgtttgtcggtgaacgctctcctgagtaggacaaatccgccgggagcggatttgaacgttgcgaagcaacggcccggagggtggcgggcaggacgcccgccataaactgccaggaattaattccccaggcatcaaataaaacgaaaggctcagtcgaaagactgggcctttcgttttatctgttgtttgtcggtgaacgctctcctgagtaggacaaatccgccgggagcggatttgaacgttgcgaagcaacggcccggagggtggcgggcaggacgcccgccataaactgccaggaattaattccccaggcatcaaataaaacgaaaggctcagtcgaaagactgggcctttcgttttatctgttgtttgtcggtgaacgctctcctgagtaggacaaatccgccgggagcggatttgaacgttgcgaagcaacggcccggagggtggcgggcaggacgcccgccataaactgccaggaattggggatcggaattaattcccggtttaaaccggggatctcgatcccgcgaaattaatacgactcactataggggaattgtgagcggataacaattcccctctagaaataattttgtttaactttaagaaggagatatacatatggactataaagacgacgacgacaaacccgggagtggtgccccaccgaccgacttgcaaaagatggtcatgagcaacactaagcctgttgagctcatccttgacggtaagacggtggccatctgctgcgccaccggagtgtttggtactgcctacctcgtgcctcgtcaccttttcgcagaaaagtacgacaggatcatgttggacggcagggccatgacagacagtgactacagagtgtttgagtttgagattaaagtaaaaggacaggacatgctctcagacgctgcgctcatggtgctccaccgtggcaaccgtgtgagagacatcacgaaacactttcgtgatacagcaagaatgaagaaaggtacccccgttgtcggcgtgatcaacaacgccgacgttgggagaccgattttctccggtgaggccctcacctacaaggacattgtagtgtgcatggatggagacaccatgccgggcctatttgcctacagagccgctaccaaggctggctactgtggaggagccgttcttgccaaggacggagctgacacatttatcgtcggcactcactccgcaggaggcaatggagtcgggtactgctcatgcgtatctaggtccatgctcttgaagatgaaggcacacattgaccccgaaccacaccacgagtagtcgacagacaagcttaggtatttattcggctcgaggttaattaagcggccgcattgatccggctgctaacaaagcccgaaaggaagctgagttggctgctgccaccgctgagcaataactagcataaccccttggggcctctaaacgggtcttgaggggttttttgctgaaaggaggaactatatccggat

SEQ ID NO: 411 - DNA, 627 bp, Bovine rhinitis
  CDS (1)..(627)
  misc_feature (1)..(627): n is c, g, a, t/u
  misc_feature (1)..(627): Bovine_Rhinitis_A_Sd-1_KP236128_3C(C23P)
agtggtgctccaccaacagacatgcagcaacacgttctcaggaacgtgcgcccaatatcacttgttccngatggaaaggttgtgtctatgtgctgtggctttggggtttttggcaactgttaccttgtgccaaaccatatgtttgaggagacttttgacacaattttgttgggggagactcccctgaagaagaaggattacgaggttattaacctcgaaacaggcgatggtgtttctgatgcagcactgttgcatgtttttaaaggccccagagttaaggacatgacaatgcacttcagagatgaagtacgcattcccaaggggacaactgttgcaggctgtgtgaacagtcacgagtttgggcgcttggtttttactggtaccgcccttacatttaaagatgtgattgtgtgttcagacggtgatgagcttccgaacgtgtttgcctacaaagctgccacacaacggggctactgtggcagtcccgttttagtgaagaacagtgcgcacacagtggtggttgggattcactctgcaggtgggaacggaaacgggtacgcgtcgtgtgtcacccgatctgtcctgttgaaggttaagagaatgcttgatcctgatgtccatcttgag

SEQ ID NO: 412 - protein, 209 aa, Bovine rhinitis
SGAPPTDMQQHVLRNVRPISLVPDGKVVSMCCGFGVFGNCYLVPNHMFEETFDTILLGETPLKKKDYEVINLETGDGVSDAALLHVFKGPRVKDMTMHFRDEVRIPKGTTVAGCVNSHEFGRLVFTGTALTFKDVIVCSDGDELPNVFAYKAATQRGYCGSPVLVKNSAHTVVVGIHSAGGNGNGYASCVTRSVLLKVKRMLDPDVHLE

SEQ ID NO: 413 - DNA, 627 bp, Bovine rhinitis
  CDS (1)..(627)
  misc_feature (1)..(627): n is c, g, a, t/u
  misc_feature (1)..(627): Bovine_Rhinitis_A_Sd-1_KP236128_3C(F120P)
agtggtgctccaccaacagacatgcagcaacacgttctcaggaacgtgcgcccaatatcacttgtttgtgatggaaaggttgtgtctatgtgctgtggctttggggtttttggcaactgttaccttgtgccaaaccatatgtttgaggagacttttgacacaattttgttgggggagactcccctgaagaagaaggattacgaggttattaacctcgaaacaggcgatggtgtttctgatgcagcactgttgcatgtttttaaaggccccagagttaaggacatgacaatgcacttcagagatgaagtacgcattcccaaggggacaactgttgcaggctgtgtgaacagtcacgagccngggcgcttggtttttactggtaccgcccttacatttaaagatgtgattgtgtgttcagacggtgatgagcttccgaacgtgtttgcctacaaagctgccacacaacggggctactgtggcagtcccgttttagtgaagaacagtgcgcacacagtggtggttgggattcactctgcaggtgggaacggaaacgggtacgcgtcgtgtgtcacccgatctgtcctgttgaaggttaagagaatgcttgatcctgatgtccatcttgag

SEQ ID NO: 414 - protein, 209 aa, Bovine rhinitis
SGAPPTDMQQHVLRNVRPISLVCDGKVVSMCCGFGVFGNCYLVPNHMFEETFDTILLGETPLKKKDYEVINLETGDGVSDAALLHVFKGPRVKDMTMHFRDEVRIPKGTTVAGCVNSHEPGRLVFTGTALTFKDVIVCSDGDELPNVFAYKAATQRGYCGSPVLVKNSAHTVVVGIHSAGGNGNGYASCVTRSVLLKVKRMLDPDVHLE

SEQ ID NO: 415 - DNA, 627 bp, Bovine rhinitis
  CDS (1)..(627)
  misc_feature (1)..(627): n is c, g, a, t/u
  misc_feature (1)..(627): Bovine_Rhinitis_A_Sd-1_KP236128_3C(L123P)
agtggtgctccaccaacagacatgcagcaacacgttctcaggaacgtgcgcccaatatcacttgtttgtgatggaaaggttgtgtctatgtgctgtggctttggggtttttggcaactgttaccttgtgccaaaccatatgtttgaggagacttttgacacaattttgttgggggagactcccctgaagaagaaggattacgaggttattaacctcgaaacaggcgatggtgtttctgatgcagcactgttgcatgtttttaaaggccccagagttaaggacatgacaatgcacttcagagatgaagtacgcattcccaaggggacaactgttgcaggctgtgtgaacagtcacgagtttgggcgcccngtttttactggtaccgcccttacatttaaagatgtgattgtgtgttcagacggtgatgagcttccgaacgtgtttgcctacaaagctgccacacaacggggctactgtggcagtcccgttttagtgaagaacagtgcgcacacagtggtggttgggattcactctgcaggtgggaacggaaacgggtacgcgtcgtgtgtcacccgatctgtcctgttgaaggttaagagaatgcttgatcctgatgtccatcttgag

SEQ ID NO: 416 - protein, 209 aa, Bovine rhinitis
SGAPPTDMQQHVLRNVRPISLVCDGKVVSMCCGFGVFGNCYLVPNHMFEETFDTILLGETPLKKKDYEVINLETGDGVSDAALLHVFKGPRVKDMTMHFRDEVRIPKGTTVAGCVNSHEFGRPVFTGTALTFKDVIVCSDGDELPNVFAYKAATQRGYCGSPVLVKNSAHTVVVGIHSAGGNGNGYASCVTRSVLLKVKRMLDPDVHLE

SEQ ID NO: 417 - DNA, 627 bp, Bovine rhinitis
  CDS (1)..(627)
  misc_feature (1)..(627): n is c, g, a, t/u
  misc_feature (1)..(627): Bovine_Rhinitis_A_Sd-1_KP236128_3C(T96P)
agtggtgctccaccaacagacatgcagcaacacgttctcaggaacgtgcgcccaatatcacttgtttgtgatggaaaggttgtgtctatgtgctgtggctttggggtttttggcaactgttaccttgtgccaaaccatatgtttgaggagacttttgacacaattttgttgggggagactcccctgaagaagaaggattacgaggttattaacctcgaaacaggcgatggtgtttctgatgcagcactgttgcatgtttttaaaggccccagagttaaggacatgccnatgcacttcagagatgaagtacgcattcccaaggggacaactgttgcaggctgtgtgaacagtcacgagtttgggcgcttggtttttactggtaccgcccttacatttaaagatgtgattgtgtgttcagacggtgatgagcttccgaacgtgtttgcctacaaagctgccacacaacggggctactgtggcagtcccgttttagtgaagaacagtgcgcacacagtggtggttgggattcactctgcaggtgggaacggaaacgggtacgcgtcgtgtgtcacccgatctgtcctgttgaaggttaagagaatgcttgatcctgatgtccatcttgag

SEQ ID NO: 418 - protein, 209 aa, Bovine rhinitis
SGAPPTDMQQHVLRNVRPISLVCDGKVVSMCCGFGVFGNCYLVPNHMFEETFDTILLGETPLKKKDYEVINLETGDGVSDAALLHVFKGPRVKDMPMHFRDEVRIPKGTTVAGCVNSHEFGRLVFTGTALTFKDVIVCSDGDELPNVFAYKAATQRGYCGSPVLVKNSAHTVVVGIHSAGGNGNGYASCVTRSVLLKVKRMLDPDVHLE

SEQ ID NO: 419 - DNA, 627 bp, Bovine rhinitis
  CDS (1)..(627)
  misc_feature (1)..(627): n is c, g, a, t/u
  misc_feature (1)..(627): Bovine_Rhinitis_A_Sd-1_KP236128_3C(V22P)
agtggtgctccaccaacagacatgcagcaacacgttctcaggaacgtgcgcccaatatcacttccntgtgatggaaaggttgtgtctatgtgctgtggctttggggtttttggcaactgttaccttgtgccaaaccatatgtttgaggagacttttgacacaattttgttgggggagactcccctgaagaagaaggattacgaggttattaacctcgaaacaggcgatggtgtttctgatgcagcactgttgcatgtttttaaaggccccagagttaaggacatgacaatgcacttcagagatgaagtacgcattcccaaggggacaactgttgcaggctgtgtgaacagtcacgagtttgggcgcttggtttttactggtaccgcccttacatttaaagatgtgattgtgtgttcagacggtgatgagcttccgaacgtgtttgcctacaaagctgccacacaacggggctactgtggcagtcccgttttagtgaagaacagtgcgcacacagtggtggttgggattcactctgcaggtgggaacggaaacgggtacgcgtcgtgtgtcacccgatctgtcctgttgaaggttaagagaatgcttgatcctgatgtccatcttgag

SEQ ID NO: 420 - protein, 209 aa, Bovine rhinitis
SGAPPTDMQQHVLRNVRPISLPCDGKVVSMCCGFGVFGNCYLVPNHMFEETFDTILLGETPLKKKDYEVINLETGDGVSDAALLHVFKGPRVKDMTMHFRDEVRIPKGTTVAGCVNSHEFGRLVFTGTALTFKDVIVCSDGDELPNVFAYKAATQRGYCGSPVLVKNSAHTVVVGIHSAGGNGNGYASCVTRSVLLKVKRMLDPDVHLE

SEQ ID NO: 421 - DNA, 627 bp, Bovine rhinitis
  CDS (1)..(627)
  misc_feature (1)..(627): Bovine_Rhinitis_A_Sd-1_KP236128_3C(wt)
agtggtgctccaccaacagacatgcagcaacacgttctcaggaacgtgcgcccaatatcacttgtttgtgatggaaaggttgtgtctatgtgctgtggctttggggtttttggcaactgttaccttgtgccaaaccatatgtttgaggagacttttgacacaattttgttgggggagactcccctgaagaagaaggattacgaggttattaacctcgaaacaggcgatggtgtttctgatgcagcactgttgcatgtttttaaaggccccagagttaaggacatgacaatgcacttcagagatgaagtacgcattcccaaggggacaactgttgcaggctgtgtgaacagtcacgagtttgggcgcttggtttttactggtaccgcccttacatttaaagatgtgattgtgtgttcagacggtgatgagcttccgaacgtgtttgcctacaaagctgccacacaacggggctactgtggcagtcccgttttagtgaagaacagtgcgcacacagtggtggttgggattcactctgcaggtgggaacggaaacgggtacgcgtcgtgtgtcacccgatctgtcctgttgaaggttaagagaatgcttgatcctgatgtccatcttgag

SEQ ID NO: 422 - protein, 209 aa, Bovine rhinitis
SGAPPTDMQQHVLRNVRPISLVCDGKVVSMCCGFGVFGNCYLVPNHMFEETFDTILLGETPLKKKDYEVINLETGDGVSDAALLHVFKGPRVKDMTMHFRDEVRIPKGTTVAGCVNSHEFGRLVFTGTALTFKDVIVCSDGDELPNVFAYKAATQRGYCGSPVLVKNSAHTVVVGIHSAGGNGNGYASCVTRSVLLKVKRMLDPDVHLE

SEQ ID NO: 423 - DNA, 624 bp, Bovine rhinitis
  CDS (1)..(624)
  misc_feature (1)..(624): n is c, g, a, t/u
  misc_feature (1)..(624): Bovine_Rhinitus_B_3C(L124P)
agtgggaaccctccaactgacatgcagttggtggtactcaagaacacacaaccaatttcactagttagagatggacaaattgtcgccacttgttgtgctcttggcgtttttggaaccacctatttagttccctaccacctctttgaagaaagttttgacaccctcattataggagacagacatctgaaagaacaagactacaaacttgacacttttgaactcagagacgggaaaatcagcgatgttgctgccctcaccttaaacaaaggagcccgtgtgcgtgacattacctcacactttcgagacgaggtcaaggtcactaagaattcaccagttgtcggttgtgtcaagaacacaacggtcggtcaaccngtatttaacgggacagctgctggttttaaagaccatatcatctgctctgatggtgacactctgcctaatatgttcgtttacactgccaacacacagtacgggtattgcggaagcggcatactcgtcaaagatggttctcacacagtcatcataggcatccatagtgcaggaggtaacggaaaaggttacgctagttgtgtcactcgttccgcactcctcgcactgaggggcagagaaaggcccgagctcgaa

SEQ ID NO: 424 - protein, 208 aa, Bovine rhinitis
SGNPPTDMQLVVLKNTQPISLVRDGQIVATCCALGVFGTTYLVPYHLFEESFDTLIIGDRHLKEQDYKLDTFELRDGKISDVAALTLNKGARVRDITSHFRDEVKVTKNSPVVGCVKNTTVGQPVFNGTAAGFKDHIICSDGDTLPNMFVYTANTQYGYCGSGILVKDGSHTVIIGIHSAGGNGKGYASCVTRSALLALRGRERPELE

SEQ ID NO: 425 - DNA, 624 bp, Bovine rhinitis
  CDS (1)..(624)
  misc_feature (1)..(624): n is c, g, a, t/u
  misc_feature (1)..(624): Bovine_Rhinitus_B_3C(R23P)
agtgggaaccctccaactgacatgcagttggtggtactcaagaacacacaaccaatttcactagttccngatggacaaattgtcgccacttgttgtgctcttggcgtttttggaaccacctatttagttccctaccacctctttgaagaaagttttgacaccctcattataggagacagacatctgaaagaacaagactacaaacttgacacttttgaactcagagacgggaaaatcagcgatgttgctgccctcaccttaaacaaaggagcccgtgtgcgtgacattacctcacactttcgagacgaggtcaaggtcactaagaattcaccagttgtcggttgtgtcaagaacacaacggtcggtcaactggtatttaacgggacagctgctggttttaaagaccatatcatctgctctgatggtgacactctgcctaatatgttcgtttacactgccaacacacagtacgggtattgcggaagcggcatactcgtcaaagatggttctcacacagtcatcataggcatccatagtgcaggaggtaacggaaaaggttacgctagttgtgtcactcgttccgcactcctcgcactgaggggcagagaaaggcccgagctcgaa

SEQ ID NO: 426 - protein, 208 aa, Bovine rhinitis
SGNPPTDMQLVVLKNTQPISLVPDGQIVATCCALGVFGTTYLVPYHLFEESFDTLIIGDRHLKEQDYKLDTFELRDGKISDVAALTLNKGARVRDITSHFRDEVKVTKNSPVVGCVKNTTVGQLVFNGTAAGFKDHIICSDGDTLPNMFVYTANTQYGYCGSGILVKDGSHTVIIGIHSAGGNGKGYASCVTRSALLALRGRERPELE

SEQ ID NO: 427 - DNA, 624 bp, Bovine rhinitis
  CDS (1)..(624)
  misc_feature (1)..(624): n is c, g, a, t/u
  misc_feature (1)..(624): Bovine_Rhinitus_B_3C(T97P)
agtgggaaccctccaactgacatgcagttggtggtactcaagaacacacaaccaatttcactagttagagatggacaaattgtcgccacttgttgtgctcttggcgtttttggaaccacctatttagttccctaccacctctttgaagaaagttttgacaccctcattataggagacagacatctgaaagaacaagactacaaacttgacacttttgaactcagagacgggaaaatcagcgatgttgctgccctcaccttaaacaaaggagcccgtgtgcgtgacattccntcacactttcgagacgaggtcaaggtcactaagaattcaccagttgtcggttgtgtcaagaacacaacggtcggtcaactggtatttaacgggacagctgctggttttaaagaccatatcatctgctctgatggtgacactctgcctaatatgttcgtttacactgccaacacacagtacgggtattgcggaagcggcatactcgtcaaagatggttctcacacagtcatcataggcatccatagtgcaggaggtaacggaaaaggttacgctagttgtgtcactcgttccgcactcctcgcactgaggggcagagaaaggcccgagctcgaa

SEQ ID NO: 428 - protein, 208 aa, Bovine rhinitis
SGNPPTDMQLVVLKNTQPISLVRDGQIVATCCALGVFGTTYLVPYHLFEESFDTLIIGDRHLKEQDYKLDTFELRDGKISDVAALTLNKGARVRDIPSHFRDEVKVTKNSPVVGCVKNTTVGQLVFNGTAAGFKDHIICSDGDTLPNMFVYTANTQYGYCGSGILVKDGSHTVIIGIHSAGGNGKGYASCVTRSALLALRGRERPELE

SEQ ID NO: 429 - DNA, 624 bp, Bovine rhinitis
  CDS (1)..(624)
  misc_feature (1)..(624): n is c, g, a, t/u
  misc_feature (1)..(624): Bovine_Rhinitus_B_3C(V121P)
agtgggaaccctccaactgacatgcagttggtggtactcaagaacacacaaccaatttcactagttagagatggacaaattgtcgccacttgttgtgctcttggcgtttttggaaccacctatttagttccctaccacctctttgaagaaagttttgacaccctcattataggagacagacatctgaaagaacaagactacaaacttgacacttttgaactcagagacgggaaaatcagcgatgttgctgccctcaccttaaacaaaggagcccgtgtgcgtgacattacctcacactttcgagacgaggtcaaggtcactaagaattcaccagttgtcggttgtgtcaagaacacaacgccnggtcaactggtatttaacgggacagctgctggttttaaagaccatatcatctgctctgatggtgacactctgcctaatatgttcgtttacactgccaacacacagtacgggtattgcggaagcggcatactcgtcaaagatggttctcacacagtcatcataggcatccatagtgcaggaggtaacggaaaaggttacgctagttgtgtcactcgttccgcactcctcgcactgaggggcagagaaaggcccgagctcgaa

SEQ ID NO: 430 - protein, 208 aa, Bovine rhinitis
SGNPPTDMQLVVLKNTQPISLVRDGQIVATCCALGVFGTTYLVPYHLFEESFDTLIIGDRHLKEQDYKLDTFELRDGKISDVAALTLNKGARVRDITSHFRDEVKVTKNSPVVGCVKNTTPGQLVFNGTAAGFKDHIICSDGDTLPNMFVYTANTQYGYCGSGILVKDGSHTVIIGIHSAGGNGKGYASCVTRSALLALRGRERPELE

SEQ ID NO: 431 - DNA, 624 bp, Bovine rhinitis
  CDS (1)..(624)
  misc_feature (1)..(624): n is c, g, a, t/u
  misc_feature (1)..(624): Bovine_Rhinitus_B_3C(V22P)
agtgggaaccctccaactgacatgcagttggtggtactcaagaacacacaaccaatttcactaccnagagatggacaaattgtcgccacttgttgtgctcttggcgtttttggaaccacctatttagttccctaccacctctttgaagaaagttttgacaccctcattataggagacagacatctgaaagaacaagactacaaacttgacacttttgaactcagagacgggaaaatcagcgatgttgctgccctcaccttaaacaaaggagcccgtgtgcgtgacattacctcacactttcgagacgaggtcaaggtcactaagaattcaccagttgtcggttgtgtcaagaacacaacggtcggtcaactggtatttaacgggacagctgctggttttaaagaccatatcatctgctctgatggtgacactctgcctaatatgttcgtttacactgccaacacacagtacgggtattgcggaagcggcatactcgtcaaagatggttctcacacagtcatcataggcatccatagtgcaggaggtaacggaaaaggttacgctagttgtgtcactcgttccgcactcctcgcactgaggggcagagaaaggcccgagctcgaa

SEQ ID NO: 432 - protein, 208 aa, Bovine rhinitis
SGNPPTDMQLVVLKNTQPISLPRDGQIVATCCALGVFGTTYLVPYHLFEESFDTLIIGDRHLKEQDYKLDTFELRDGKISDVAALTLNKGARVRDITSHFRDEVKVTKNSPVVGCVKNTTVGQLVFNGTAAGFKDHIICSDGDTLPNMFVYTANTQYGYCGSGILVKDGSHTVIIGIHSAGGNGKGYASCVTRSALLALRGRERPELE

SEQ ID NO: 433 - DNA, 624 bp, Bovine rhinitis
  CDS (1)..(624)
  misc_feature (1)..(624): Bovine_Rhinitus_B_3C(wt)
agtgggaaccctccaactgacatgcagttggtggtactcaagaacacacaaccaatttcactagttagagatggacaaattgtcgccacttgttgtgctcttggcgtttttggaaccacctatttagttccctaccacctctttgaagaaagttttgacaccctcattataggagacagacatctgaaagaacaagactacaaacttgacacttttgaactcagagacgggaaaatcagcgatgttgctgccctcaccttaaacaaaggagcccgtgtgcgtgacattacctcacactttcgagacgaggtcaaggtcactaagaattcaccagttgtcggttgtgtcaagaacacaacggtcggtcaactggtatttaacgggacagctgctggttttaaagaccatatcatctgctctgatggtgacactctgcctaatatgttcgtttacactgccaacacacagtacgggtattgcggaagcggcatactcgtcaaagatggttctcacacagtcatcataggcatccatagtgcaggaggtaacggaaaaggttacgctagttgtgtcactcgttccgcactcctcgcactgaggggcagagaaaggcccgagctcgaa

SEQ ID NO: 434 - protein, 208 aa, Bovine rhinitis
SGNPPTDMQLVVLKNTQPISLVRDGQIVATCCALGVFGTTYLVPYHLFEESFDTLIIGDRHLKEQDYKLDTFELRDGKISDVAALTLNKGARVRDITSHFRDEVKVTKNSPVVGCVKNTTVGQLVFNGTAAGFKDHIICSDGDTLPNMFVYTANTQYGYCGSGILVKDGSHTVIIGIHSAGGNGKGYASCVTRSALLALRGRERPELE

SEQ ID NO: 435 - DNA, 615 bp, Equine Rhinitus
  CDS (1)..(615)
  misc_feature (1)..(615): n is c, g, a, t/u
  misc_feature (1)..(615): Equine_Rhinitus_A_3C(A125P)
actggagttccagcaactgatttgcaacaatctattatgaagaatgttcagccaattgagctttattgtgatggtaatttggttactgattgttctgctttgggtgtttatgataactcctatttggttcccttgcatttgtttgagtttgattttgacaccattgtgcttggcggtcgccagtacaagaaagctgattgtgaaaaagtggaatttgaacttgaaattaatggagatatggtgtcatcggacgcgtgcttgctccgggttccaaccggaccaaaagtgagaaatattgttcatcttttcacaaatgaaattgagttaaaaaagatgacccaaattacaggaattatgaattctccacaccaaccncgcactgtgttttttggcagttttttgacagtaaaaaaatctattttgacatcagatgggactgttatgcctaatgtcttgtcttacgcagcccagacctcgcgggggtattgtggcgcagcaattgtggcaggctcacctgcccgcatcattggcattcattctgctggtactgggtctgtagccttttgctccctggtgtccagagatgcgctggagcgcactctccctcagaaacag

SEQ ID NO: 436 - protein, 205 aa, Equine Rhinitus
TGVPATDLQQSIMKNVQPIELYCDGNLVTDCSALGVYDNSYLVPLHLFEFDFDTIVLGGRQYKKADCEKVEFELEINGDMVSSDACLLRVPTGPKVRNIVHLFTNEIELKKMTQITGIMNSPHQPRTVFFGSFLTVKKSILTSDGTVMPNVLSYAAQTSRGYCGAAIVAGSPARIIGIHSAGTGSVAFCSLVSRDALERTLPQKQ

SEQ ID NO: 437 - DNA, 615 bp, Equine rhinitis
  CDS (1)..(615)
  misc_feature (1)..(615): n is c, g, a, t/u
  misc_feature (1)..(615): Equine_Rhinitus_A_3C(C23P)
actggagttccagcaactgatttgcaacaatctattatgaagaatgttcagccaattgagctttatccngatggtaatttggttactgattgttctgctttgggtgtttatgataactcctatttggttcccttgcatttgtttgagtttgattttgacaccattgtgcttggcggtcgccagtacaagaaagctgattgtgaaaaagtggaatttgaacttgaaattaatggagatatggtgtcatcggacgcgtgcttgctccgggttccaaccggaccaaaagtgagaaatattgttcatcttttcacaaatgaaattgagttaaaaaagatgacccaaattacaggaattatgaattctccacaccaagcacgcactgtgttttttggcagttttttgacagtaaaaaaatctattttgacatcagatgggactgttatgcctaatgtcttgtcttacgcagcccagacctcgcgggggtattgtggcgcagcaattgtggcaggctcacctgcccgcatcattggcattcattctgctggtactgggtctgtagccttttgctccctggtgtccagagatgcgctggagcgcactctccctcagaaacag

SEQ ID NO: 438 - protein, 205 aa, Equine rhinitis
TGVPATDLQQSIMKNVQPIELYPDGNLVTDCSALGVYDNSYLVPLHLFEFDFDTIVLGGRQYKKADCEKVEFELEINGDMVSSDACLLRVPTGPKVRNIVHLFTNEIELKKMTQITGIMNSPHQARTVFFGSFLTVKKSILTSDGTVMPNVLSYAAQTSRGYCGAAIVAGSPARIIGIHSAGTGSVAFCSLVSRDALERTLPQKQ

SEQ ID NO: 439 - DNA, 615 bp, Equine Rhinitus
  CDS (1)..(615)
  misc_feature (1)..(615): n is c, g, a, t/u
  misc_feature (1)..(615): Equine_Rhinitus_A_3C(T127P)
actggagttccagcaactgatttgcaacaatctattatgaagaatgttcagccaattgagctttattgtgatggtaatttggttactgattgttctgctttgggtgtttatgataactcctatttggttcccttgcatttgtttgagtttgattttgacaccattgtgcttggcggtcgccagtacaagaaagctgattgtgaaaaagtggaatttgaacttgaaattaatggagatatggtgtcatcggacgcgtgcttgctccgggttccaaccggaccaaaagtgagaaatattgttcatcttttcacaaatgaaattgagttaaaaaagatgacccaaattacaggaattatgaattctccacaccaagcacgcccngtgttttttggcagttttttgacagtaaaaaaatctattttgacatcagatgggactgttatgcctaatgtcttgtcttacgcagcccagacctcgcgggggtattgtggcgcagcaattgtggcaggctcacctgcccgcatcattggcattcattctgctggtactgggtctgtagccttttgctccctggtgtccagagatgcgctggagcgcactctccctcagaaacag

SEQ ID NO: 440 - protein, 205 aa, Equine Rhinitus
TGVPATDLQQSIMKNVQPIELYCDGNLVTDCSALGVYDNSYLVPLHLFEFDFDTIVLGGRQYKKADCEKVEFELEINGDMVSSDACLLRVPTGPKVRNIVHLFTNEIELKKMTQITGIMNSPHQARPVFFGSFLTVKKSILTSDGTVMPNVLSYAAQTSRGYCGAAIVAGSPARIIGIHSAGTGSVAFCSLVSRDALERTLPQKQ

SEQ ID NO: 441 - DNA, 615 bp, Equine Rhinitus
  CDS (1)..(615)
  misc_feature (1)..(615): n is c, g, a, t/u
  misc_feature (1)..(615): Equine_Rhinitus_A_3C(V100P)
actggagttccagcaactgatttgcaacaatctattatgaagaatgttcagccaattgagctttattgtgatggtaatttggttactgattgttctgctttgggtgtttatgataactcctatttggttcccttgcatttgtttgagtttgattttgacaccattgtgcttggcggtcgccagtacaagaaagctgattgtgaaaaagtggaatttgaacttgaaattaatggagatatggtgtcatcggacgcgtgcttgctccgggttccaaccggaccaaaagtgagaaatattccncatcttttcacaaatgaaattgagttaaaaaagatgacccaaattacaggaattatgaattctccacaccaagcacgcactgtgttttttggcagttttttgacagtaaaaaaatctattttgacatcagatgggactgttatgcctaatgtcttgtcttacgcagcccagacctcgcgggggtattgtggcgcagcaattgtggcaggctcacctgcccgcatcattggcattcattctgctggtactgggtctgtagccttttgctccctggtgtccagagatgcgctggagcgcactctccctcagaaacag

SEQ ID NO: 442 - protein, 205 aa, Equine Rhinitus
TGVPATDLQQSIMKNVQPIELYCDGNLVTDCSALGVYDNSYLVPLHLFEFDFDTIVLGGRQYKKADCEKVEFELEINGDMVSSDACLLRVPTGPKVRNIPHLFTNEIELKKMTQITGIMNSPHQARTVFFGSFLTVKKSILTSDGTVMPNVLSYAAQTSRGYCGAAIVAGSPARIIGIHSAGTGSVAFCSLVSRDALERTLPQKQ

SEQ ID NO: 443 - DNA, 615 bp, Equine Rhinitus
  CDS (1)..(615)
  misc_feature (1)..(615): Equine_Rhinitus_A_3C(wt)
actggagttccagcaactgatttgcaacaatctattatgaagaatgttcagccaattgagctttattgtgatggtaatttggttactgattgttctgctttgggtgtttatgataactcctatttggttcccttgcatttgtttgagtttgattttgacaccattgtgcttggcggtcgccagtacaagaaagctgattgtgaaaaagtggaatttgaacttgaaattaatggagatatggtgtcatcggacgcgtgcttgctccgggttccaaccggaccaaaagtgagaaatattgttcatcttttcacaaatgaaattgagttaaaaaagatgacccaaattacaggaattatgaattctccacaccaagcacgcactgtgttttttggcagttttttgacagtaaaaaaatctattttgacatcagatgggactgttatgcctaatgtcttgtcttacgcagcccagacctcgcgggggtattgtggcgcagcaattgtggcaggctcacctgcccgcatcattggcattcattctgctggtactgggtctgtagccttttgctccctggtgtccagagatgcgctggagcgcactctccctcagaaacag

SEQ ID NO: 444 - protein, 205 aa, Equine Rhinitus
TGVPATDLQQSIMKNVQPIELYCDGNLVTDCSALGVYDNSYLVPLHLFEFDFDTIVLGGRQYKKADCEKVEFELEINGDMVSSDACLLRVPTGPKVRNIVHLFTNEIELKKMTQITGIMNSPHQARTVFFGSFLTVKKSILTSDGTVMPNVLSYAAQTSRGYCGAAIVAGSPARIIGIHSAGTGSVAFCSLVSRDALERTLPQKQ

SEQ ID NO: 445 - DNA, 615 bp, Equine Rhinitus
  CDS (1)..(615)
  misc_feature (1)..(615): n is c, g, a, t/u
  misc_feature (1)..(615): Equine_Rhinitus_A_3C(Y22P)
actggagttccagcaactgatttgcaacaatctattatgaagaatgttcagccaattgagcttccntgtgatggtaatttggttactgattgttctgctttgggtgtttatgataactcctatttggttcccttgcatttgtttgagtttgattttgacaccattgtgcttggcggtcgccagtacaagaaagctgattgtgaaaaagtggaatttgaacttgaaattaatggagatatggtgtcatcggacgcgtgcttgctccgggttccaaccggaccaaaagtgagaaatattgttcatcttttcacaaatgaaattgagttaaaaaagatgacccaaattacaggaattatgaattctccacaccaagcacgcactgtgttttttggcagttttttgacagtaaaaaaatctattttgacatcagatgggactgttatgcctaatgtcttgtcttacgcagcccagacctcgcgggggtattgtggcgcagcaattgtggcaggctcacctgcccgcatcattggcattcattctgctggtactgggtctgtagccttttgctccctggtgtccagagatgcgctggagcgcactctccctcagaaacag

SEQ ID NO: 446 - protein, 205 aa, Equine Rhinitus
TGVPATDLQQSIMKNVQPIELPCDGNLVTDCSALGVYDNSYLVPLHLFEFDFDTIVLGGRQYKKADCEKVEFELEINGDMVSSDACLLRVPTGPKVRNIVHLFTNEIELKKMTQITGIMNSPHQARTVFFGSFLTVKKSILTSDGTVMPNVLSYAAQTSRGYCGAAIVAGSPARIIGIHSAGTGSVAFCSLVSRDALERTLPQKQ

SEQ ID NO: 447 - DNA, 549 bp, Human coxsackievirus
  CDS (1)..(549)
  misc_feature (1)..(549): n is c, g, a, t/u
  misc_feature (1)..(549): Human_Coxsackievirus_A1_Tompkins_3C(F109P)
ggcccagtatttgattatgcagttgcaatggcaaagaaaaacatcctgacagccaccacagaaaagggtgaattcacaatgttaggagtacatgatagagttgcagtattgcctacccattcaaacccaggtgaaacaatagttgtgtcaggaaaagaagtgaagatcttggatgcaaagaggctggttgataatgatgaggtcaatcttgaaattactattgtaaccctagacagaaacgaaaagtttagagacatcagaactcacttaccgacccaaatccatgagaccaatgatgcggttttggctgtcaacacctccaaaccnccaaatatgtacattccagttggatcagtagttgaacagggaatgttgaaccttggtggcagacccacaaatagaaccctaatgtataactttccaactaaagcagggcagtgtggtggtgtcttaatggccactggcaaagtgattggcatacatgttggtggtaatggatctcacggtttcgcagctgcacttaaaagaagttactttactgaagaacag

SEQ ID NO: 448 - protein, 183 aa, Human coxsackievirus
GPVFDYAVAMAKKNILTATTEKGEFTMLGVHDRVAVLPTHSNPGETIVVSGKEVKILDAKRLVDNDEVNLEITIVTLDRNEKFRDIRTHLPTQIHETNDAVLAVNTSKPPNMYIPVGSVVEQGMLNLGGRPTNRTLMYNFPTKAGQCGGVLMATGKVIGIHVGGNGSHGFAAALKRSYFTEEQ

SEQ ID NO: 449 - DNA, 549 bp, Human coxsackievirus
  CDS (1)..(549)
  misc_feature (1)..(549): n is c, g, a, t/u
  misc_feature (1)..(549): Human_Coxsackievirus_A1_Tompkins_3C(L102P)
ggcccagtatttgattatgcagttgcaatggcaaagaaaaacatcctgacagccaccacagaaaagggtgaattcacaatgttaggagtacatgatagagttgcagtattgcctacccattcaaacccaggtgaaacaatagttgtgtcaggaaaagaagtgaagatcttggatgcaaagaggctggttgataatgatgaggtcaatcttgaaattactattgtaaccctagacagaaacgaaaagtttagagacatcagaactcacttaccgacccaaatccatgagaccaatgatgcggttccngctgtcaacacctccaaatttccaaatatgtacattccagttggatcagtagttgaacagggaatgttgaaccttggtggcagacccacaaatagaaccctaatgtataactttccaactaaagcagggcagtgtggtggtgtcttaatggccactggcaaagtgattggcatacatgttggtggtaatggatctcacggtttcgcagctgcacttaaaagaagttactttactgaagaacag

SEQ ID NO: 450 - protein, 183 aa, Human coxsackievirus
GPVFDYAVAMAKKNILTATTEKGEFTMLGVHDRVAVLPTHSNPGETIVVSGKEVKILDAKRLVDNDEVNLEITIVTLDRNEKFRDIRTHLPTQIHETNDAVPAVNTSKFPNMYIPVGSVVEQGMLNLGGRPTNRTLMYNFPTKAGQCGGVLMATGKVIGIHVGGNGSHGFAAALKRSYFTEEQ

SEQ ID NO: 451 - DNA, 549 bp, Human coxsackievirus
  CDS (1)..(549)
  misc_feature (1)..(549): n is c, g, a, t/u
  misc_feature (1)..(549): Human_Coxsackievirus_A1_Tompkins_3C(N105P)
ggcccagtatttgattatgcagttgcaatggcaaagaaaaacatcctgacagccaccacagaaaagggtgaattcacaatgttaggagtacatgatagagttgcagtattgcctacccattcaaacccaggtgaaacaatagttgtgtcaggaaaagaagtgaagatcttggatgcaaagaggctggttgataatgatgaggtcaatcttgaaattactattgtaaccctagacagaaacgaaaagtttagagacatcagaactcacttaccgacccaaatccatgagaccaatgatgcggttttggctgtcccnacctccaaatttccaaatatgtacattccagttggatcagtagttgaacagggaatgttgaaccttggtggcagacccacaaatagaaccctaatgtataactttccaactaaagcagggcagtgtggtggtgtcttaatggccactggcaaagtgattggcatacatgttggtggtaatggatctcacggtttcgcagctgcacttaaaagaagttactttactgaagaacag

SEQ ID NO: 452 - protein, 183 aa, Human coxsackievirus
GPVFDYAVAMAKKNILTATTEKGEFTMLGVHDRVAVLPTHSNPGETIVVSGKEVKILDAKRLVDNDEVNLEITIVTLDRNEKFRDIRTHLPTQIHETNDAVLAVPTSKFPNMYIPVGSVVEQGMLNLGGRPTNRTLMYNFPTKAGQCGGVLMATGKVIGIHVGGNGSHGFAAALKRSYFTEEQ

SEQ ID NO: 453 - DNA, 549 bp, Human coxsackievirus
  CDS (1)..(549)
  misc_feature (1)..(549): n is c, g, a, t/u
  misc_feature (1)..(549): Human_Coxsackievirus_A1_Tompkins_3C(R87P)
ggcccagtatttgattatgcagttgcaatggcaaagaaaaacatcctgacagccaccacagaaaagggtgaattcacaatgttaggagtacatgatagagttgcagtattgcctacccattcaaacccaggtgaaacaatagttgtgtcaggaaaagaagtgaagatcttggatgcaaagaggctggttgataatgatgaggtcaatcttgaaattactattgtaaccctagacagaaacgaaaagtttagagacatcccnactcacttaccgacccaaatccatgagaccaatgatgcggttttggctgtcaacacctccaaatttccaaatatgtacattccagttggatcagtagttgaacagggaatgttgaaccttggtggcagacccacaaatagaaccctaatgtataactttccaactaaagcagggcagtgtggtggtgtcttaatggccactggcaaagtgattggcatacatgttggtggtaatggatctcacggtttcgcagctgcacttaaaagaagttactttactgaagaacag

SEQ ID NO: 454 - protein, 183 aa, Human coxsackievirus
GPVFDYAVAMAKKNILTATTEKGEFTMLGVHDRVAVLPTHSNPGETIVVSGKEVKILDAKRLVDNDEVNLEITIVTLDRNEKFRDIPTHLPTQIHETNDAVLAVNTSKFPNMYIPVGSVVEQGMLNLGGRPTNRTLMYNFPTKAGQCGGVLMATGKVIGIHVGGNGSHGFAAALKRSYFTEEQ

SEQ ID NO: 455 - DNA, 549 bp, Human coxsackievirus
  CDS (1)..(549)
  misc_feature (1)..(549): n is c, g, a, t/u
  misc_feature (1)..(549): Human_Coxsackievirus_A1_Tompkins_3C(T106P)
ggcccagtatttgattatgcagttgcaatggcaaagaaaaacatcctgacagccaccacagaaaagggtgaattcacaatgttaggagtacatgatagagttgcagtattgcctacccattcaaacccaggtgaaacaatagttgtgtcaggaaaagaagtgaagatcttggatgcaaagaggctggttgataatgatgaggtcaatcttgaaattactattgtaaccctagacagaaacgaaaagtttagagacatcagaactcacttaccgacccaaatccatgagaccaatgatgcggttttggctgtcaacccntccaaatttccaaatatgtacattccagttggatcagtagttgaacagggaatgttgaaccttggtggcagacccacaaatagaaccctaatgtataactttccaactaaagcagggcagtgtggtggtgtcttaatggccactggcaaagtgattggcatacatgttggtggtaatggatctcacggtttcgcagctgcacttaaaagaagttactttactgaagaacag

SEQ ID NO: 456 - protein, 183 aa, Human coxsackievirus
GPVFDYAVAMAKKNILTATTEKGEFTMLGVHDRVAVLPTHSNPGETIVVSGKEVKILDAKRLVDNDEVNLEITIVTLDRNEKFRDIRTHLPTQIHETNDAVLAVNPSKFPNMYIPVGSVVEQGMLNLGGRPTNRTLMYNFPTKAGQCGGVLMATGKVIGIHVGGNGSHGFAAALKRSYFTEEQ

SEQ ID NO: 457 - DNA, 549 bp, Human coxsackievirus
  CDS (1)..(549)
  misc_feature (1)..(549): Human_Coxsackievirus_A1_Tompkins_3C(T19P)
  misc_feature (1)..(549): Human_Coxsackievirus_A1_Tompkins_3C(T19P)
ggcccagtatttgattatgcagttgcaatggcaaagaaaaacatcctgacagccccnacagaaaagggtgaattcacaatgttaggagtacatgatagagttgcagtattgcctacccattcaaacccaggtgaaacaatagttgtgtcaggaaaagaagtgaagatcttggatgcaaagaggctggttgataatgatgaggtcaatcttgaaattactattgtaaccctagacagaaacgaaaagtttagagacatcagaactcacttaccgacccaaatccatgagaccaatgatgcggttttggctgtcaacacctccaaatttccaaatatgtacattccagttggatcagtagttgaacagggaatgttgaaccttggtggcagacccacaaatagaaccctaatgtataactttccaactaaagcagggcagtgtggtggtgtcttaatggccactggcaaagtgattggcatacatgttggtggtaatggatctcacggtttcgcagctgcacttaaaagaagttactttactgaagaacag

SEQ ID NO: 458 - protein, 183 aa, Human coxsackievirus
GPVFDYAVAMAKKNILTAPTEKGEFTMLGVHDRVAVLPTHSNPGETIVVSGKEVKILDAKRLVDNDEVNLEITIVTLDRNEKFRDIRTHLPTQIHETNDAVLAVNTSKFPNMYIPVGSVVEQGMLNLGGRPTNRTLMYNFPTKAGQCGGVLMATGKVIGIHVGGNGSHGFAAALKRSYFTEEQ

SEQ ID NO: 459 - DNA, 549 bp, Human coxsackievirus
  CDS (1)..(549)
  misc_feature (1)..(549): n is c, g, a, t/u
  misc_feature (1)..(549): Human_Coxsackievirus_A1_Tompkins_3C(T20P)
ggcccagtatttgattatgcagttgcaatggcaaagaaaaacatcctgacagccaccccngaaaagggtgaattcacaatgttaggagtacatgatagagttgcagtattgcctacccattcaaacccaggtgaaacaatagttgtgtcaggaaaagaagtgaagatcttggatgcaaagaggctggttgataatgatgaggtcaatcttgaaattactattgtaaccctagacagaaacgaaaagtttagagacatcagaactcacttaccgacccaaatccatgagaccaatgatgcggttttggctgtcaacacctccaaatttccaaatatgtacattccagttggatcagtagttgaacagggaatgttgaaccttggtggcagacccacaaatagaaccctaatgtataactttccaactaaagcagggcagtgtggtggtgtcttaatggccactggcaaagtgattggcatacatgttggtggtaatggatctcacggtttcgcagctgcacttaaaagaagttactttactgaagaacag

SEQ ID NO: 460 - protein, 183 aa, Human coxsackievirus
GPVFDYAVAMAKKNILTATPEKGEFTMLGVHDRVAVLPTHSNPGETIVVSGKEVKILDAKRLVDNDEVNLEITIVTLDRNEKFRDIRTHLPTQIHETNDAVLAVNTSKFPNMYIPVGSVVEQGMLNLGGRPTNRTLMYNFPTKAGQCGGVLMATGKVIGIHVGGNGSHGFAAALKRSYFTEEQ

SEQ ID NO: 461 - DNA, 549 bp, Human coxsackievirus
  CDS (1)..(549)
  misc_feature (1)..(549): Human_Coxsackievirus_A1_Tompkins_3C(wt)
ggcccagtatttgattatgcagttgcaatggcaaagaaaaacatcctgacagccaccacagaaaagggtgaattcacaatgttaggagtacatgatagagttgcagtattgcctacccattcaaacccaggtgaaacaatagttgtgtcaggaaaagaagtgaagatcttggatgcaaagaggctggttgataatgatgaggtcaatcttgaaattactattgtaaccctagacagaaacgaaaagtttagagacatcagaactcacttaccgacccaaatccatgagaccaatgatgcggttttggctgtcaacacctccaaatttccaaatatgtacattccagttggatcagtagttgaacagggaatgttgaaccttggtggcagacccacaaatagaaccctaatgtataactttccaactaaagcagggcagtgtggtggtgtcttaatggccactggcaaagtgattggcatacatgttggtggtaatggatctcacggtttcgcagctgcacttaaaagaagttactttactgaagaacag

SEQ ID NO: 462 - protein, 183 aa, Human coxsackievirus
GPVFDYAVAMAKKNILTATTEKGEFTMLGVHDRVAVLPTHSNPGETIVVSGKEVKILDAKRLVDNDEVNLEITIVTLDRNEKFRDIRTHLPTQIHETNDAVLAVNTSKFPNMYIPVGSVVEQGMLNLGGRPTNRTLMYNFPTKAGQCGGVLMATGKVIGIHVGGNGSHGFAAALKRSYFTEEQ

SEQ ID NO: 463 - DNA, 549 bp, Human coxsackievirus
  CDS (1)..(549)
  misc_feature (1)..(549): n is c, g, a, t/u
  misc_feature (1)..(549): Human_Coxsackievirus_A10_Kowalik_3C(L102P)
ggacctagcttggacttcgctttgtctcttctgaggcgcaacatcagacaagcgcagaccgaccagggacacttcaccatgctaggcatacgggaccgtctagccatcttgccacgccactcacaaccagggaagaccatctggatagagcacaaattggtcaacgtactagatgcagttgagttggtggatgagcaaggtgttaatttggaactcacgctggtgaccttggacactaatgagaagtttagggacattaccaagttcatcccagagacaatagctggtgctagtgatgcaactccngttatcaacactgagcatatgccctcgatgtttgtgccaataggtgacgttgtgcagtatgggtttttgaatctcagtggcaaacccacacacagaactatgatgtacaatttccccacgaaagcaggacagtgtgggggggtagtcacttcagttggcaagatcattggaatccacattggcgggaatggacgccagggcttctgcgctggtttaaagaggagctactttgccagcgagcaa

SEQ ID NO: 464 - protein, 183 aa, Human coxsackievirus
GPSLDFALSLLRRNIRQAQTDQGHFTMLGIRDRLAILPRHSQPGKTIWIEHKLVNVLDAVELVDEQGVNLELTLVTLDTNEKFRDITKFIPETIAGASDATPVINTEHMPSMFVPIGDVVQYGFLNLSGKPTHRTMMYNFPTKAGQCGGVVTSVGKIIGIHIGGNGRQGFCAGLKRSYFASEQ

SEQ ID NO: 465 - DNA, 549 bp, Human coxsackievirus
  CDS (1)..(549)
  misc_feature (1)..(549): n is c, g, a, t/u
  misc_feature (1)..(549): Human_Coxsackievirus_A10_Kowalik_3C(M109P)
ggacctagcttggacttcgctttgtctcttctgaggcgcaacatcagacaagcgcagaccgaccagggacacttcaccatgctaggcatacgggaccgtctagccatcttgccacgccactcacaaccagggaagaccatctggatagagcacaaattggtcaacgtactagatgcagttgagttggtggatgagcaaggtgttaatttggaactcacgctggtgaccttggacactaatgagaagtttagggacattaccaagttcatcccagagacaatagctggtgctagtgatgcaactctagttatcaacactgagcatccnccctcgatgtttgtgccaataggtgacgttgtgcagtatgggtttttgaatctcagtggcaaacccacacacagaactatgatgtacaatttccccacgaaagcaggacagtgtgggggggtagtcacttcagttggcaagatcattggaatccacattggcgggaatggacgccagggcttctgcgctggtttaaagaggagctactttgccagcgagcaa

SEQ ID NO: 466 - protein, 183 aa, Human coxsackievirus
GPSLDFALSLLRRNIRQAQTDQGHFTMLGIRDRLAILPRHSQPGKTIWIEHKLVNVLDAVELVDEQGVNLELTLVTLDTNEKFRDITKFIPETIAGASDATLVINTEHPPSMFVPIGDVVQYGFLNLSGKPTHRTMMYNFPTKAGQCGGVVTSVGKIIGIHIGGNGRQGFCAGLKRSYFASEQ

SEQ ID NO: 467 - DNA, 549 bp, Human coxsackievirus
  CDS (1)..(549)
  misc_feature (1)..(549): n is c, g, a, t/u
  misc_feature (1)..(549): Human_Coxsackievirus_A10_Kowalik_3C(N105P)
ggacctagcttggacttcgctttgtctcttctgaggcgcaacatcagacaagcgcagaccgaccagggacacttcaccatgctaggcatacgggaccgtctagccatcttgccacgccactcacaaccagggaagaccatctggatagagcacaaattggtcaacgtactagatgcagttgagttggtggatgagcaaggtgttaatttggaactcacgctggtgaccttggacactaatgagaagtttagggacattaccaagttcatcccagagacaatagctggtgctagtgatgcaactctagttatcccnactgagcatatgccctcgatgtttgtgccaataggtgacgttgtgcagtatgggtttttgaatctcagtggcaaacccacacacagaactatgatgtacaatttccccacgaaagcaggacagtgtgggggggtagtcacttcagttggcaagatcattggaatccacattggcgggaatggacgccagggcttctgcgctggtttaaagaggagctactttgccagcgagcaa

SEQ ID NO: 468 - protein, 183 aa, Human coxsackievirus
GPSLDFALSLLRRNIRQAQTDQGHFTMLGIRDRLAILPRHSQPGKTIWIEHKLVNVLDAVELVDEQGVNLELTLVTLDTNEKFRDITKFIPETIAGASDATLVIPTEHMPSMFVPIGDVVQYGFLNLSGKPTHRTMMYNFPTKAGQCGGVVTSVGKIIGIHIGGNGRQGFCAGLKRSYFASEQ

SEQ ID NO: 469 - DNA, 549 bp, Human coxsackievirus
  CDS (1)..(549)
  misc_feature (1)..(549): n is c, g, a, t/u
  misc_feature (1)..(549): Human_Coxsackievirus_A10_Kowalik_3C(Q19P)
ggacctagcttggacttcgctttgtctcttctgaggcgcaacatcagacaagcgccnaccgaccagggacacttcaccatgctaggcatacgggaccgtctagccatcttgccacgccactcacaaccagggaagaccatctggatagagcacaaattggtcaacgtactagatgcagttgagttggtggatgagcaaggtgttaatttggaactcacgctggtgaccttggacactaatgagaagtttagggacattaccaagttcatcccagagacaatagctggtgctagtgatgcaactctagttatcaacactgagcatatgccctcgatgtttgtgccaataggtgacgttgtgcagtatgggtttttgaatctcagtggcaaacccacacacagaactatgatgtacaatttccccacgaaagcaggacagtgtgggggggtagtcacttcagttggcaagatcattggaatccacattggcgggaatggacgccagggcttctgcgctggtttaaagaggagctactttgccagcgagcaa

SEQ ID NO: 470 - protein, 183 aa, Human coxsackievirus
GPSLDFALSLLRRNIRQAPTDQGHFTMLGIRDRLAILPRHSQPGKTIWIEHKLVNVLDAVELVDEQGVNLELTLVTLDTNEKFRDITKFIPETIAGASDATLVINTEHMPSMFVPIGDVVQYGFLNLSGKPTHRTMMYNFPTKAGQCGGVVTSVGKIIGIHIGGNGRQGFCAGLKRSYFASEQ

SEQ ID NO: 471 - DNA, 549 bp, Human coxsackievirus
  CDS (1)..(549)
  misc_feature (1)..(549): n is c, g, a, t/u
  misc_feature (1)..(549): Human_Coxsackievirus_A10_Kowalik_3C(T106P)
ggacctagcttggacttcgctttgtctcttctgaggcgcaacatcagacaagcgcagaccgaccagggacacttcaccatgctaggcatacgggaccgtctagccatcttgccacgccactcacaaccagggaagaccatctggatagagcacaaattggtcaacgtactagatgcagttgagttggtggatgagcaaggtgttaatttggaactcacgctggtgaccttggacactaatgagaagtttagggacattaccaagttcatcccagagacaatagctggtgctagtgatgcaactctagttatcaacccngagcatatgccctcgatgtttgtgccaataggtgacgttgtgcagtatgggtttttgaatctcagtggcaaacccacacacagaactatgatgtacaatttccccacgaaagcaggacagtgtgggggggtagtcacttcagttggcaagatcattggaatccacattggcgggaatggacgccagggcttctgcgctggtttaaagaggagctactttgccagcgagcaa

SEQ ID NO: 472 - protein, 183 aa, Human coxsackievirus
GPSLDFALSLLRRNIRQAQTDQGHFTMLGIRDRLAILPRHSQPGKTIWIEHKLVNVLDAVELVDEQGVNLELTLVTLDTNEKFRDITKFIPETIAGASDATLVINPEHMPSMFVPIGDVVQYGFLNLSGKPTHRTMMYNFPTKAGQCGGVVTSVGKIIGIHIGGNGRQGFCAGLKRSYFASEQ

SEQ ID NO: 473 - DNA, 549 bp, Human coxsackievirus
  CDS (1)..(549)
  misc_feature (1)..(549): n is c, g, a, t/u
  misc_feature (1)..(549): Human_Coxsackievirus_A10_Kowalik_3C(T20P)
ggacctagcttggacttcgctttgtctcttctgaggcgcaacatcagacaagcgcagccngaccagggacacttcaccatgctaggcatacgggaccgtctagccatcttgccacgccactcacaaccagggaagaccatctggatagagcacaaattggtcaacgtactagatgcagttgagttggtggatgagcaaggtgttaatttggaactcacgctggtgaccttggacactaatgagaagtttagggacattaccaagttcatcccagagacaatagctggtgctagtgatgcaactctagttatcaacactgagcatatgccctcgatgtttgtgccaataggtgacgttgtgcagtatgggtttttgaatctcagtggcaaacccacacacagaactatgatgtacaatttccccacgaaagcaggacagtgtgggggggtagtcacttcagttggcaagatcattggaatccacattggcgggaatggacgccagggcttctgcgctggtttaaagaggagctactttgccagcgagcaa

SEQ ID NO: 474 - protein, 183 aa, Human coxsackievirus
GPSLDFALSLLRRNIRQAQPDQGHFTMLGIRDRLAILPRHSQPGKTIWIEHKLVNVLDAVELVDEQGVNLELTLVTLDTNEKFRDITKFIPETIAGASDATLVINTEHMPSMFVPIGDVVQYGFLNLSGKPTHRTMMYNFPTKAGQCGGVVTSVGKIIGIHIGGNGRQGFCAGLKRSYFASEQ

SEQ ID NO: 475 - DNA, 549 bp, Human coxsackievirus
  CDS (1)..(549)
  misc_feature (1)..(549): n is c, g, a, t/u
  misc_feature (1)..(549): Human_Coxsackievirus_A10_Kowalik_3C(T87P)
ggacctagcttggacttcgctttgtctcttctgaggcgcaacatcagacaagcgcagaccgaccagggacacttcaccatgctaggcatacgggaccgtctagccatcttgccacgccactcacaaccagggaagaccatctggatagagcacaaattggtcaacgtactagatgcagttgagttggtggatgagcaaggtgttaatttggaactcacgctggtgaccttggacactaatgagaagtttagggacattccnaagttcatcccagagacaatagctggtgctagtgatgcaactctagttatcaacactgagcatatgccctcgatgtttgtgccaataggtgacgttgtgcagtatgggtttttgaatctcagtggcaaacccacacacagaactatgatgtacaatttccccacgaaagcaggacagtgtgggggggtagtcacttcagttggcaagatcattggaatccacattggcgggaatggacgccagggcttctgcgctggtttaaagaggagctactttgccagcgagcaa

SEQ ID NO: 476 - protein, 183 aa, Human coxsackievirus
GPSLDFALSLLRRNIRQAQTDQGHFTMLGIRDRLAILPRHSQPGKTIWIEHKLVNVLDAVELVDEQGVNLELTLVTLDTNEKFRDIPKFIPETIAGASDATLVINTEHMPSMFVPIGDVVQYGFLNLSGKPTHRTMMYNFPTKAGQCGGVVTSVGKIIGIHIGGNGRQGFCAGLKRSYFASEQ

SEQ ID NO: 477 - DNA, 549 bp, Human coxsackievirus
  CDS (1)..(549)
  misc_feature (1)..(549): n is c, g, a, t/u
  misc_feature (1)..(549): Human_Coxsackievirus_A10_Kowalik_3C(wt)
ggacctagcttggacttcgctttgtctcttctgaggcgcaacatcagacaagcgcagaccgaccagggacacttcaccatgctaggcatacgggaccgtctagccatcttgccacgccactcacaaccagggaagaccatctggatagagcacaaattggtcaacgtactagatgcagttgagttggtggatgagcaaggtgttaatttggaactcacgctggtgaccttggacactaatgagaagtttagggacattaccaagttcatcccagagacaatagctggtgctagtgatgcaactctagttatcaacactgagcatatgccctcgatgtttgtgccaataggtgacgttgtgcagtatgggtttttgaatctcagtggcaaacccacacacagaactatgatgtacaatttccccacgaaagcaggacagtgtgggggggtagtcacttcagttggcaagatcattggaatccacattggcgggaatggacgccagggcttctgcgctggtttaaagaggagctactttgccagcgagcaa

SEQ ID NO: 478 - protein, 183 aa, Human coxsackievirus
GPSLDFALSLLRRNIRQAQTDQGHFTMLGIRDRLAILPRHSQPGKTIWIEHKLVNVLDAVELVDEQGVNLELTLVTLDTNEKFRDITKFIPETIAGASDATLVINTEHMPSMFVPIGDVVQYGFLNLSGKPTHRTMMYNFPTKAGQCGGVVTSVGKIIGIHIGGNGRQGFCAGLKRSYFASEQ

SEQ ID NO: 479 - DNA, 549 bp, Human coxsackievirus
  CDS (1)..(549)
  misc_feature (1)..(549): n is c, g, a, t/u
  misc_feature (1)..(549): Human_Coxsackievirus_B1_3C(F109P)
ggacctgtatttgagtttgccgtagccatgatgaagaggaattcgagcacagtgaaaactgaatacggtgagttcactatgctgggtatctatgataggtgggctgttttgccacgtcatgccaaacctgggccaaccatcttaatgaatgatcaagaaattggtgtgctagacgccaaggagttagtggacaaggacggtacaaacttggaactgacactacttaagctgaaccgaaatgaaaagttcagagatattaggggcttcttagccaaggaagaggtggaggttaatgaggctgtgctagcaattaacaccagcaagccncctaacatgtatatcccagtgggacaagttacagagtatggcttcctgaatctgggtggtacacccaccaagagaatgcttatgtacaacttccccacgagggcaggtcagtgtggcggagtgctcatgtccactggcaaagttttggggatccatgttggcgggaatggtcatcaaggcttctcagcggcacttcttaaacactacttcaatgatgaacaa

SEQ ID NO: 480 - protein, 183 aa, Human coxsackievirus
GPVFEFAVAMMKRNSSTVKTEYGEFTMLGIYDRWAVLPRHAKPGPTILMNDQEIGVLDAKELVDKDGTNLELTLLKLNRNEKFRDIRGFLAKEEVEVNEAVLAINTSKPPNMYIPVGQVTEYGFLNLGGTPTKRMLMYNFPTRAGQCGGVLMSTGKVLGIHVGGNGHQGFSAALLKHYFNDEQ

SEQ ID NO: 481 - DNA, 549 bp, Human coxsackievirus
  CDS (1)..(549)
  misc_feature (1)..(549): n is c, g, a, t/u
  misc_feature (1)..(549): Human_Coxsackievirus_B1_3C(K19P)
ggacctgtatttgagtttgccgtagccatgatgaagaggaattcgagcacagtgccnactgaatacggtgagttcactatgctgggtatctatgataggtgggctgttttgccacgtcatgccaaacctgggccaaccatcttaatgaatgatcaagaaattggtgtgctagacgccaaggagttagtggacaaggacggtacaaacttggaactgacactacttaagctgaaccgaaatgaaaagttcagagatattaggggcttcttagccaaggaagaggtggaggttaatgaggctgtgctagcaattaacaccagcaagttccctaacatgtatatcccagtgggacaagttacagagtatggcttcctgaatctgggtggtacacccaccaagagaatgcttatgtacaacttccccacgagggcaggtcagtgtggcggagtgctcatgtccactggcaaagttttggggatccatgttggcgggaatggtcatcaaggcttctcagcggcacttcttaaacactacttcaatgatgaacaa

SEQ ID NO: 482 - protein, 183 aa, Human coxsackievirus
GPVFEFAVAMMKRNSSTVPTEYGEFTMLGIYDRWAVLPRHAKPGPTILMNDQEIGVLDAKELVDKDGTNLELTLLKLNRNEKFRDIRGFLAKEEVEVNEAVLAINTSKFPNMYIPVGQVTEYGFLNLGGTPTKRMLMYNFPTRAGQCGGVLMSTGKVLGIHVGGNGHQGFSAALLKHYFNDEQ

SEQ ID NO: 483 - DNA, 549 bp, Human coxsackievirus
  CDS (1)..(549)
  misc_feature (1)..(549): n is c, g, a, t/u
  misc_feature (1)..(549): Human_Coxsackievirus_B1_3C(L102P)
ggacctgtatttgagtttgccgtagccatgatgaagaggaattcgagcacagtgaaaactgaatacggtgagttcactatgctgggtatctatgataggtgggctgttttgccacgtcatgccaaacctgggccaaccatcttaatgaatgatcaagaaattggtgtgctagacgccaaggagttagtggacaaggacggtacaaacttggaactgacactacttaagctgaaccgaaatgaaaagttcagagatattaggggcttcttagccaaggaagaggtggaggttaatgaggctgtgccngcaattaacaccagcaagttccctaacatgtatatcccagtgggacaagttacagagtatggcttcctgaatctgggtggtacacccaccaagagaatgcttatgtacaacttccccacgagggcaggtcagtgtggcggagtgctcatgtccactggcaaagttttggggatccatgttggcgggaatggtcatcaaggcttctcagcggcacttcttaaacactacttcaatgatgaacaa

SEQ ID NO: 484 - protein, 183 aa, Human coxsackievirus
GPVFEFAVAMMKRNSSTVKTEYGEFTMLGIYDRWAVLPRHAKPGPTILMNDQEIGVLDAKELVDKDGTNLELTLLKLNRNEKFRDIRGFLAKEEVEVNEAVPAINTSKFPNMYIPVGQVTEYGFLNLGGTPTKRMLMYNFPTRAGQCGGVLMSTGKVLGIHVGGNGHQGFSAALLKHYFNDEQ

SEQ ID NO: 485 - DNA, 549 bp, Human coxsackievirus
  CDS (1)..(549)
  misc_feature (1)..(549): n is c, g, a, t/u
  misc_feature (1)..(549): Human_Coxsackievirus_B1_3C(N105P)
ggacctgtatttgagtttgccgtagccatgatgaagaggaattcgagcacagtgaaaactgaatacggtgagttcactatgctgggtatctatgataggtgggctgttttgccacgtcatgccaaacctgggccaaccatcttaatgaatgatcaagaaattggtgtgctagacgccaaggagttagtggacaaggacggtacaaacttggaactgacactacttaagctgaaccgaaatgaaaagttcagagatattaggggcttcttagccaaggaagaggtggaggttaatgaggctgtgctagcaattccnaccagcaagttccctaacatgtatatcccagtgggacaagttacagagtatggcttcctgaatctgggtggtacacccaccaagagaatgcttatgtacaacttccccacgagggcaggtcagtgtggcggagtgctcatgtccactggcaaagttttggggatccatgttggcgggaatggtcatcaaggcttctcagcggcacttcttaaacactacttcaatgatgaacaa

SEQ ID NO: 486 - protein, 183 aa, Human coxsackievirus
GPVFEFAVAMMKRNSSTVKTEYGEFTMLGIYDRWAVLPRHAKPGPTILMNDQEIGVLDAKELVDKDGTNLELTLLKLNRNEKFRDIRGFLAKEEVEVNEAVLAIPTSKFPNMYIPVGQVTEYGFLNLGGTPTKRMLMYNFPTRAGQCGGVLMSTGKVLGIHVGGNGHQGFSAALLKHYFNDEQ

SEQ ID NO: 487 - DNA, 549 bp, Human coxsackievirus
  CDS (1)..(549)
  misc_feature (1)..(549): n is c, g, a, t/u
  misc_feature (1)..(549): Human_Coxsackievirus_B1_3C(R87P)
ggacctgtatttgagtttgccgtagccatgatgaagaggaattcgagcacagtgaaaactgaatacggtgagttcactatgctgggtatctatgataggtgggctgttttgccacgtcatgccaaacctgggccaaccatcttaatgaatgatcaagaaattggtgtgctagacgccaaggagttagtggacaaggacggtacaaacttggaactgacactacttaagctgaaccgaaatgaaaagttcagagatattccnggcttcttagccaaggaagaggtggaggttaatgaggctgtgctagcaattaacaccagcaagttccctaacatgtatatcccagtgggacaagttacagagtatggcttcctgaatctgggtggtacacccaccaagagaatgcttatgtacaacttccccacgagggcaggtcagtgtggcggagtgctcatgtccactggcaaagttttggggatccatgttggcgggaatggtcatcaaggcttctcagcggcacttcttaaacactacttcaatgatgaacaa

SEQ ID NO: 488 - protein, 183 aa, Human coxsackievirus
GPVFEFAVAMMKRNSSTVKTEYGEFTMLGIYDRWAVLPRHAKPGPTILMNDQEIGVLDAKELVDKDGTNLELTLLKLNRNEKFRDIPGFLAKEEVEVNEAVLAINTSKFPNMYIPVGQVTEYGFLNLGGTPTKRMLMYNFPTRAGQCGGVLMSTGKVLGIHVGGNGHQGFSAALLKHYFNDEQ

SEQ ID NO: 489 - DNA, 549 bp, Human coxsackievirus
  CDS (1)..(549)
  misc_feature (1)..(549): n is c, g, a, t/u
  misc_feature (1)..(549): Human_Coxsackievirus_B1_3C(T106P)
ggacctgtatttgagtttgccgtagccatgatgaagaggaattcgagcacagtgaaaactgaatacggtgagttcactatgctgggtatctatgataggtgggctgttttgccacgtcatgccaaacctgggccaaccatcttaatgaatgatcaagaaattggtgtgctagacgccaaggagttagtggacaaggacggtacaaacttggaactgacactacttaagctgaaccgaaatgaaaagttcagagatattaggggcttcttagccaaggaagaggtggaggttaatgaggctgtgctagcaattaacccnagcaagttccctaacatgtatatcccagtgggacaagttacagagtatggcttcctgaatctgggtggtacacccaccaagagaatgcttatgtacaacttccccacgagggcaggtcagtgtggcggagtgctcatgtccactggcaaagttttggggatccatgttggcgggaatggtcatcaaggcttctcagcggcacttcttaaacactacttcaatgatgaacaa

SEQ ID NO: 490 - protein, 183 aa, Human coxsackievirus
GPVFEFAVAMMKRNSSTVKTEYGEFTMLGIYDRWAVLPRHAKPGPTILMNDQEIGVLDAKELVDKDGTNLELTLLKLNRNEKFRDIRGFLAKEEVEVNEAVLAINPSKFPNMYIPVGQVTEYGFLNLGGTPTKRMLMYNFPTRAGQCGGVLMSTGKVLGIHVGGNGHQGFSAALLKHYFNDEQ

SEQ ID NO: 491 - DNA, 549 bp, Human coxsackievirus
  CDS (1)..(549)
  misc_feature (1)..(549): n is c, g, a, t/u
  misc_feature (1)..(549): Human_Coxsackievirus_B1_3C(T20P)
ggacctgtatttgagtttgccgtagccatgatgaagaggaattcgagcacagtgaaaccngaatacggtgagttcactatgctgggtatctatgataggtgggctgttttgccacgtcatgccaaacctgggccaaccatcttaatgaatgatcaagaaattggtgtgctagacgccaaggagttagtggacaaggacggtacaaacttggaactgacactacttaagctgaaccgaaatgaaaagttcagagatattaggggcttcttagccaaggaagaggtggaggttaatgaggctgtgctagcaattaacaccagcaagttccctaacatgtatatcccagtgggacaagttacagagtatggcttcctgaatctgggtggtacacccaccaagagaatgcttatgtacaacttccccacgagggcaggtcagtgtggcggagtgctcatgtccactggcaaagttttggggatccatgttggcgggaatggtcatcaaggcttctcagcggcacttcttaaacactacttcaatgatgaacaa

SEQ ID NO: 492 - protein, 183 aa, Human coxsackievirus
GPVFEFAVAMMKRNSSTVKPEYGEFTMLGIYDRWAVLPRHAKPGPTILMNDQEIGVLDAKELVDKDGTNLELTLLKLNRNEKFRDIRGFLAKEEVEVNEAVLAINTSKFPNMYIPVGQVTEYGFLNLGGTPTKRMLMYNFPTRAGQCGGVLMSTGKVLGIHVGGNGHQGFSAALLKHYFNDEQ

SEQ ID NO: 493 - DNA, 549 bp, Human coxsackievirus
  CDS (1)..(549)
  misc_feature (1)..(549): Human_Coxsackievirus_B1_3C(wt)
ggacctgtatttgagtttgccgtagccatgatgaagaggaattcgagcacagtgaaaactgaatacggtgagttcactatgctgggtatctatgataggtgggctgttttgccacgtcatgccaaacctgggccaaccatcttaatgaatgatcaagaaattggtgtgctagacgccaaggagttagtggacaaggacggtacaaacttggaactgacactacttaagctgaaccgaaatgaaaagttcagagatattaggggcttcttagccaaggaagaggtggaggttaatgaggctgtgctagcaattaacaccagcaagttccctaacatgtatatcccagtgggacaagttacagagtatggcttcctgaatctgggtggtacacccaccaagagaatgcttatgtacaacttccccacgagggcaggtcagtgtggcggagtgctcatgtccactggcaaagttttggggatccatgttggcgggaatggtcatcaaggcttctcagcggcacttcttaaacactacttcaatgatgaacaa

SEQ ID NO: 494 - protein, 183 aa, Human coxsackievirus
GPVFEFAVAMMKRNSSTVKTEYGEFTMLGIYDRWAVLPRHAKPGPTILMNDQEIGVLDAKELVDKDGTNLELTLLKLNRNEKFRDIRGFLAKEEVEVNEAVLAINTSKFPNMYIPVGQVTEYGFLNLGGTPTKRMLMYNFPTRAGQCGGVLMSTGKVLGIHVGGNGHQGFSAALLKHYFNDEQ

SEQ ID NO: 495 - DNA, 549 bp, Human coxsackievirus
  CDS (1)..(549)
  misc_feature (1)..(549): n is c, g, a, t/u
  misc_feature (1)..(549): Human_Coxsackievirus_B3_Macocy_3C(F109P)
ggccctgcctttgagttcgccgtcgcaatgatgaaaaggaactcaagcacggtgaagactgaatatggcgagtttaccatgctgggcatctatgacaggtgggccgttttgccacgccacgccaaacctgggccaaccatcttgatgaatgatcaagaggttggtgtgctagatgccaaggagctagtagacaaggacggcaccaacttagaactgacactactcaaattgaaccggaatgagaagttcagagacatcagaggcttcttagccaaggaggaagtggaggttaatgaggcagtgctagcaattaacaccagcaagccncccaacatgtacattccagtaggacaggtcacagaatacggcttcctaaacctaggtggcacacccaccaagagaatgcttatgtacaacttccccacaagagcaggccagtgtggtggagtgctcatgtccaccggcaaggtactgggtatccatgttggtggaaatggccatcagggcttctcagcagcactcctcaaacactacttcaatgatgagcaa

SEQ ID NO: 496 - protein, 183 aa, Human coxsackievirus
GPAFEFAVAMMKRNSSTVKTEYGEFTMLGIYDRWAVLPRHAKPGPTILMNDQEVGVLDAKELVDKDGTNLELTLLKLNRNEKFRDIRGFLAKEEVEVNEAVLAINTSKPPNMYIPVGQVTEYGFLNLGGTPTKRMLMYNFPTRAGQCGGVLMSTGKVLGIHVGGNGHQGFSAALLKHYFNDEQ

SEQ ID NO: 497 - DNA, 549 bp, Human coxsackievirus
  CDS (1)..(549)
  misc_feature (1)..(549): n is c, g, a, t/u
  misc_feature (1)..(549): Human_Coxsackievirus_B3_Macocy_3C(K19P)
ggccctgcctttgagttcgccgtcgcaatgatgaaaaggaactcaagcacggtgccnactgaatatggcgagtttaccatgctgggcatctatgacaggtgggccgttttgccacgccacgccaaacctgggccaaccatcttgatgaatgatcaagaggttggtgtgctagatgccaaggagctagtagacaaggacggcaccaacttagaactgacactactcaaattgaaccggaatgagaagttcagagacatcagaggcttcttagccaaggaggaagtggaggttaatgaggcagtgctagcaattaacaccagcaagtttcccaacatgtacattccagtaggacaggtcacagaatacggcttcctaaacctaggtggcacacccaccaagagaatgcttatgtacaacttccccacaagagcaggccagtgtggtggagtgctcatgtccaccggcaaggtactgggtatccatgttggtggaaatggccatcagggcttctcagcagcactcctcaaacactacttcaatgatgagcaa

SEQ ID NO: 498 - protein, 183 aa, Human coxsackievirus
GPAFEFAVAMMKRNSSTVPTEYGEFTMLGIYDRWAVLPRHAKPGPTILMNDQEVGVLDAKELVDKDGTNLELTLLKLNRNEKFRDIRGFLAKEEVEVNEAVLAINTSKFPNMYIPVGQVTEYGFLNLGGTPTKRMLMYNFPTRAGQCGGVLMSTGKVLGIHVGGNGHQGFSAALLKHYFNDEQ

SEQ ID NO: 499 - DNA, 549 bp, Human coxsackievirus
  CDS (1)..(549)
  misc_feature (1)..(549): n is c, g, a, t/u
  misc_feature (1)..(549): Human_Coxsackievirus_B3_Macocy_3C(L102P)
ggccctgcctttgagttcgccgtcgcaatgatgaaaaggaactcaagcacggtgaagactgaatatggcgagtttaccatgctgggcatctatgacaggtgggccgttttgccacgccacgccaaacctgggccaaccatcttgatgaatgatcaagaggttggtgtgctagatgccaaggagctagtagacaaggacggcaccaacttagaactgacactactcaaattgaaccggaatgagaagttcagagacatcagaggcttcttagccaaggaggaagtggaggttaatgaggcagtgccngcaattaacaccagcaagtttcccaacatgtacattccagtaggacaggtcacagaatacggcttcctaaacctaggtggcacacccaccaagagaatgcttatgtacaacttccccacaagagcaggccagtgtggtggagtgctcatgtccaccggcaaggtactgggtatccatgttggtggaaatggccatcagggcttctcagcagcactcctcaaacactacttcaatgatgagcaa

SEQ ID NO: 500 - protein, 183 aa, Human coxsackievirus
GPAFEFAVAMMKRNSSTVKTEYGEFTMLGIYDRWAVLPRHAKPGPTILMNDQEVGVLDAKELVDKDGTNLELTLLKLNRNEKFRDIRGFLAKEEVEVNEAVPAINTSKFPNMYIPVGQVTEYGFLNLGGTPTKRMLMYNFPTRAGQCGGVLMSTGKVLGIHVGGNGHQGFSAALLKHYFNDEQ

SEQ ID NO: 501 - DNA, 549 bp, Human coxsackievirus
  CDS (1)..(549)
  misc_feature (1)..(549): n is c, g, a, t/u
  misc_feature (1)..(549): Human_Coxsackievirus_B3_Macocy_3C(N105P)
ggccctgcctttgagttcgccgtcgcaatgatgaaaaggaactcaagcacggtgaagactgaatatggcgagtttaccatgctgggcatctatgacaggtgggccgttttgccacgccacgccaaacctgggccaaccatcttgatgaatgatcaagaggttggtgtgctagatgccaaggagctagtagacaaggacggcaccaacttagaactgacactactcaaattgaaccggaatgagaagttcagagacatcagaggcttcttagccaaggaggaagtggaggttaatgaggcagtgctagcaattccnaccagcaagtttcccaacatgtacattccagtaggacaggtcacagaatacggcttcctaaacctaggtggcacacccaccaagagaatgcttatgtacaacttccccacaagagcaggccagtgtggtggagtgctcatgtccaccggcaaggtactgggtatccatgttggtggaaatggccatcagggcttctcagcagcactcctcaaacactacttcaatgatgagcaa

SEQ ID NO: 502 - protein, 183 aa, Human coxsackievirus
GPAFEFAVAMMKRNSSTVKTEYGEFTMLGIYDRWAVLPRHAKPGPTILMNDQEVGVLDAKELVDKDGTNLELTLLKLNRNEKFRDIRGFLAKEEVEVNEAVLAIPTSKFPNMYIPVGQVTEYGFLNLGGTPTKRMLMYNFPTRAGQCGGVLMSTGKVLGIHVGGNGHQGFSAALLKHYFNDEQ

SEQ ID NO: 503 - DNA, 549 bp, Human coxsackievirus
  CDS (1)..(549)
  misc_feature (1)..(549): n is c, g, a, t/u
  misc_feature (1)..(549): Human_Coxsackievirus_B3_Macocy_3C(R87P)
ggccctgcctttgagttcgccgtcgcaatgatgaaaaggaactcaagcacggtgaagactgaatatggcgagtttaccatgctgggcatctatgacaggtgggccgttttgccacgccacgccaaacctgggccaaccatcttgatgaatgatcaagaggttggtgtgctagatgccaaggagctagtagacaaggacggcaccaacttagaactgacactactcaaattgaaccggaatgagaagttcagagacatcccnggcttcttagccaaggaggaagtggaggttaatgaggcagtgctagcaattaacaccagcaagtttcccaacatgtacattccagtaggacaggtcacagaatacggcttcctaaacctaggtggcacacccaccaagagaatgcttatgtacaacttccccacaagagcaggccagtgtggtggagtgctcatgtccaccggcaaggtactgggtatccatgttggtggaaatggccatcagggcttctcagcagcactcctcaaacactacttcaatgatgagcaa

SEQ ID NO: 504 - protein, 183 aa, Human coxsackievirus
GPAFEFAVAMMKRNSSTVKTEYGEFTMLGIYDRWAVLPRHAKPGPTILMNDQEVGVLDAKELVDKDGTNLELTLLKLNRNEKFRDIPGFLAKEEVEVNEAVLAINTSKFPNMYIPVGQVTEYGFLNLGGTPTKRMLMYNFPTRAGQCGGVLMSTGKVLGIHVGGNGHQGFSAALLKHYFNDEQ

SEQ ID NO: 505 - DNA, 549 bp, Human coxsackievirus
  CDS (1)..(549)
  misc_feature (1)..(549): n is c, g, a, t/u
  misc_feature (1)..(549): Human_Coxsackievirus_B3_Macocy_3C(T106P)
ggccctgcctttgagttcgccgtcgcaatgatgaaaaggaactcaagcacggtgaagactgaatatggcgagtttaccatgctgggcatctatgacaggtgggccgttttgccacgccacgccaaacctgggccaaccatcttgatgaatgatcaagaggttggtgtgctagatgccaaggagctagtagacaaggacggcaccaacttagaactgacactactcaaattgaaccggaatgagaagttcagagacatcagaggcttcttagccaaggaggaagtggaggttaatgaggcagtgctagcaattaacccnagcaagtttcccaacatgtacattccagtaggacaggtcacagaatacggcttcctaaacctaggtggcacacccaccaagagaatgcttatgtacaacttccccacaagagcaggccagtgtggtggagtgctcatgtccaccggcaaggtactgggtatccatgttggtggaaatggccatcagggcttctcagcagcactcctcaaacactacttcaatgatgagcaa

SEQ ID NO: 506 - protein, 183 aa, Human coxsackievirus
GPAFEFAVAMMKRNSSTVKTEYGEFTMLGIYDRWAVLPRHAKPGPTILMNDQEVGVLDAKELVDKDGTNLELTLLKLNRNEKFRDIRGFLAKEEVEVNEAVLAINPSKFPNMYIPVGQVTEYGFLNLGGTPTKRMLMYNFPTRAGQCGGVLMSTGKVLGIHVGGNGHQGFSAALLKHYFNDEQ

SEQ ID NO: 507 - DNA, 549 bp, Human coxsackievirus
  CDS (1)..(549)
  misc_feature (1)..(549): n is c, g, a, t/u
  misc_feature (1)..(549): Human_Coxsackievirus_B3_Macocy_3C(T20P)
ggccctgcctttgagttcgccgtcgcaatgatgaaaaggaactcaagcacggtgaagccngaatatggcgagtttaccatgctgggcatctatgacaggtgggccgttttgccacgccacgccaaacctgggccaaccatcttgatgaatgatcaagaggttggtgtgctagatgccaaggagctagtagacaaggacggcaccaacttagaactgacactactcaaattgaaccggaatgagaagttcagagacatcagaggcttcttagccaaggaggaagtggaggttaatgaggcagtgctagcaattaacaccagcaagtttcccaacatgtacattccagtaggacaggtcacagaatacggcttcctaaacctaggtggcacacccaccaagagaatgcttatgtacaacttccccacaagagcaggccagtgtggtggagtgctcatgtccaccggcaaggtactgggtatccatgttggtggaaatggccatcagggcttctcagcagcactcctcaaacactacttcaatgatgagcaa

SEQ ID NO: 508 - protein, 183 aa, Human coxsackievirus
GPAFEFAVAMMKRNSSTVKPEYGEFTMLGIYDRWAVLPRHAKPGPTILMNDQEVGVLDAKELVDKDGTNLELTLLKLNRNEKFRDIRGFLAKEEVEVNEAVLAINTSKFPNMYIPVGQVTEYGFLNLGGTPTKRMLMYNFPTRAGQCGGVLMSTGKVLGIHVGGNGHQGFSAALLKHYFNDEQ

SEQ ID NO: 509 - DNA, 549 bp, Human coxsackievirus
  CDS (1)..(549)
  misc_feature (1)..(549): Human_Coxsackievirus_B3_Macocy_3C(wt)
ggccctgcctttgagttcgccgtcgcaatgatgaaaaggaactcaagcacggtgaagactgaatatggcgagtttaccatgctgggcatctatgacaggtgggccgttttgccacgccacgccaaacctgggccaaccatcttgatgaatgatcaagaggttggtgtgctagatgccaaggagctagtagacaaggacggcaccaacttagaactgacactactcaaattgaaccggaatgagaagttcagagacatcagaggcttcttagccaaggaggaagtggaggttaatgaggcagtgctagcaattaacaccagcaagtttcccaacatgtacattccagtaggacaggtcacagaatacggcttcctaaacctaggtggcacacccaccaagagaatgcttatgtacaacttccccacaagagcaggccagtgtggtggagtgctcatgtccaccggcaaggtactgggtatccatgttggtggaaatggccatcagggcttctcagcagcactcctcaaacactacttcaatgatgagcaa

SEQ ID NO: 510 - protein, 183 aa, Human coxsackievirus
GPAFEFAVAMMKRNSSTVKTEYGEFTMLGIYDRWAVLPRHAKPGPTILMNDQEVGVLDAKELVDKDGTNLELTLLKLNRNEKFRDIRGFLAKEEVEVNEAVLAINTSKFPNMYIPVGQVTEYGFLNLGGTPTKRMLMYNFPTRAGQCGGVLMSTGKVLGIHVGGNGHQGFSAALLKHYFNDEQ

SEQ ID NO: 511 - DNA, 549 bp, Human enterovirus
  CDS (1)..(549)
  misc_feature (1)..(549): n is c, g, a, t/u
  misc_feature (1)..(549): Human_Enterovirus_A71_Strain_C4_KP861243_3C(I104P)
ggcccgagccttgactttgctctctccctactgagaaggaacatcaggcaagtccaaacagaccaagggcatttcaccatgttgggtgttagggatcgcttagcagtcctcccacgccactcacaacctggcaaaaccatttggattgagcacaaactcgtgaacgtccttgatgcagttgaactggtggatgagcaaggagtcaacctggaattaaccctcatcactcttgacaccaacgaaaagtttagggatatcaccaaattcatcccagaaaatatcagcactgctagcgatgccaccctagtgccnaacacggagcacatgccatcaatgtttgtcccggtgggtgacgttgtgcagtatggctttttgaatctcagtggtaagcctacccatcgcaccatgatgtacaattttcctaccaaagcaggacagtgtggaggagtggtgacgtctgttgggaaggttgtcggtattcacattggtggcaatggcagacaaggtttttgcgcaggcctcaaaaggagttactttgctagtgaacaa

SEQ ID NO: 512 - protein, 183 aa, Human enterovirus
GPSLDFALSLLRRNIRQVQTDQGHFTMLGVRDRLAVLPRHSQPGKTIWIEHKLVNVLDAVELVDEQGVNLELTLITLDTNEKFRDITKFIPENISTASDATLVPNTEHMPSMFVPVGDVVQYGFLNLSGKPTHRTMMYNFPTKAGQCGGVVTSVGKVVGIHIGGNGRQGFCAGLKRSYFASEQ

SEQ ID NO: 513 - DNA, 549 bp, Human enterovirus
  CDS (1)..(549)
  misc_feature (1)..(549): n is c, g, a, t/u
  misc_feature (1)..(549): Human_Enterovirus_A71_Strain_C4_KP861243_3C(M109P)
ggcccgagccttgactttgctctctccctactgagaaggaacatcaggcaagtccaaacagaccaagggcatttcaccatgttgggtgttagggatcgcttagcagtcctcccacgccactcacaacctggcaaaaccatttggattgagcacaaactcgtgaacgtccttgatgcagttgaactggtggatgagcaaggagtcaacctggaattaaccctcatcactcttgacaccaacgaaaagtttagggatatcaccaaattcatcccagaaaatatcagcactgctagcgatgccaccctagtgatcaacacggagcacccnccatcaatgtttgtcccggtgggtgacgttgtgcagtatggctttttgaatctcagtggtaagcctacccatcgcaccatgatgtacaattttcctaccaaagcaggacagtgtggaggagtggtgacgtctgttgggaaggttgtcggtattcacattggtggcaatggcagacaaggtttttgcgcaggcctcaaaaggagttactttgctagtgaacaa

SEQ ID NO: 514 - protein, 183 aa, Human enterovirus
GPSLDFALSLLRRNIRQVQTDQGHFTMLGVRDRLAVLPRHSQPGKTIWIEHKLVNVLDAVELVDEQGVNLELTLITLDTNEKFRDITKFIPENISTASDATLVINTEHPPSMFVPVGDVVQYGFLNLSGKPTHRTMMYNFPTKAGQCGGVVTSVGKVVGIHIGGNGRQGFCAGLKRSYFASEQ

SEQ ID NO: 515 - DNA, 549 bp, Human enterovirus
  CDS (1)..(549)
  misc_feature (1)..(549): n is c, g, a, t/u
  misc_feature (1)..(549): Human_Enterovirus_A71_Strain_C4_KP861243_3C(N105P)
ggcccgagccttgactttgctctctccctactgagaaggaacatcaggcaagtccaaacagaccaagggcatttcaccatgttgggtgttagggatcgcttagcagtcctcccacgccactcacaacctggcaaaaccatttggattgagcacaaactcgtgaacgtccttgatgcagttgaactggtggatgagcaaggagtcaacctggaattaaccctcatcactcttgacaccaacgaaaagtttagggatatcaccaaattcatcccagaaaatatcagcactgctagcgatgccaccctagtgatcccnacggagcacatgccatcaatgtttgtcccggtgggtgacgttgtgcagtatggctttttgaatctcagtggtaagcctacccatcgcaccatgatgtacaattttcctaccaaagcaggacagtgtggaggagtggtgacgtctgttgggaaggttgtcggtattcacattggtggcaatggcagacaaggtttttgcgcaggcctcaaaaggagttactttgctagtgaacaa

SEQ ID NO: 516 - protein, 183 aa, Human enterovirus
GPSLDFALSLLRRNIRQVQTDQGHFTMLGVRDRLAVLPRHSQPGKTIWIEHKLVNVLDAVELVDEQGVNLELTLITLDTNEKFRDITKFIPENISTASDATLVIPTEHMPSMFVPVGDVVQYGFLNLSGKPTHRTMMYNFPTKAGQCGGVVTSVGKVVGIHIGGNGRQGFCAGLKRSYFASEQ

SEQ ID NO: 517 - DNA, 549 bp, Human enterovirus
  CDS (1)..(549)
  misc_feature (1)..(549): n is c, g, a, t/u
  misc_feature (1)..(549): Human_Enterovirus_A71_Strain_C4_KP861243_3C(Q19P)
ggcccgagccttgactttgctctctccctactgagaaggaacatcaggcaagtcccnacagaccaagggcatttcaccatgttgggtgttagggatcgcttagcagtcctcccacgccactcacaacctggcaaaaccatttggattgagcacaaactcgtgaacgtccttgatgcagttgaactggtggatgagcaaggagtcaacctggaattaaccctcatcactcttgacaccaacgaaaagtttagggatatcaccaaattcatcccagaaaatatcagcactgctagcgatgccaccctagtgatcaacacggagcacatgccatcaatgtttgtcccggtgggtgacgttgtgcagtatggctttttgaatctcagtggtaagcctacccatcgcaccatgatgtacaattttcctaccaaagcaggacagtgtggaggagtggtgacgtctgttgggaaggttgtcggtattcacattggtggcaatggcagacaaggtttttgcgcaggcctcaaaaggagttactttgctagtgaacaa

SEQ ID NO: 518 - protein, 183 aa, Human enterovirus
GPSLDFALSLLRRNIRQVPTDQGHFTMLGVRDRLAVLPRHSQPGKTIWIEHKLVNVLDAVELVDEQGVNLELTLITLDTNEKFRDITKFIPENISTASDATLVINTEHMPSMFVPVGDVVQYGFLNLSGKPTHRTMMYNFPTKAGQCGGVVTSVGKVVGIHIGGNGRQGFCAGLKRSYFASEQ

SEQ ID NO: 519 - DNA, 549 bp, Human enterovirus
  CDS (1)..(549)
  misc_feature (1)..(549): n is c, g, a, t/u
  misc_feature (1)..(549): Human_Enterovirus_A71_Strain_C4_KP861243_3C(T106P)
ggcccgagccttgactttgctctctccctactgagaaggaacatcaggcaagtccaaacagaccaagggcatttcaccatgttgggtgttagggatcgcttagcagtcctcccacgccactcacaacctggcaaaaccatttggattgagcacaaactcgtgaacgtccttgatgcagttgaactggtggatgagcaaggagtcaacctggaattaaccctcatcactcttgacaccaacgaaaagtttagggatatcaccaaattcatcccagaaaatatcagcactgctagcgatgccaccctagtgatcaacccngagcacatgccatcaatgtttgtcccggtgggtgacgttgtgcagtatggctttttgaatctcagtggtaagcctacccatcgcaccatgatgtacaattttcctaccaaagcaggacagtgtggaggagtggtgacgtctgttgggaaggttgtcggtattcacattggtggcaatggcagacaaggtttttgcgcaggcctcaaaaggagttactttgctagtgaacaa

SEQ ID NO: 520 - protein, 183 aa, Human enterovirus
GPSLDFALSLLRRNIRQVQTDQGHFTMLGVRDRLAVLPRHSQPGKTIWIEHKLVNVLDAVELVDEQGVNLELTLITLDTNEKFRDITKFIPENISTASDATLVINPEHMPSMFVPVGDVVQYGFLNLSGKPTHRTMMYNFPTKAGQCGGVVTSVGKVVGIHIGGNGRQGFCAGLKRSYFASEQ

SEQ ID NO: 521 - DNA, 549 bp, Human enterovirus
  CDS (1)..(549)
  misc_feature (1)..(549): n is c, g, a, t/u
  misc_feature (1)..(549): Human_Enterovirus_A71_Strain_C4_KP861243_3C(T20P)
ggcccgagccttgactttgctctctccctactgagaaggaacatcaggcaagtccaaccngaccaagggcatttcaccatgttgggtgttagggatcgcttagcagtcctcccacgccactcacaacctggcaaaaccatttggattgagcacaaactcgtgaacgtccttgatgcagttgaactggtggatgagcaaggagtcaacctggaattaaccctcatcactcttgacaccaacgaaaagtttagggatatcaccaaattcatcccagaaaatatcagcactgctagcgatgccaccctagtgatcaacacggagcacatgccatcaatgtttgtcccggtgggtgacgttgtgcagtatggctttttgaatctcagtggtaagcctacccatcgcaccatgatgtacaattttcctaccaaagcaggacagtgtggaggagtggtgacgtctgttgggaaggttgtcggtattcacattggtggcaatggcagacaaggtttttgcgcaggcctcaaaaggagttactttgctagtgaacaa

SEQ ID NO: 522 - protein, 183 aa, Human enterovirus
GPSLDFALSLLRRNIRQVQPDQGHFTMLGVRDRLAVLPRHSQPGKTIWIEHKLVNVLDAVELVDEQGVNLELTLITLDTNEKFRDITKFIPENISTASDATLVINTEHMPSMFVPVGDVVQYGFLNLSGKPTHRTMMYNFPTKAGQCGGVVTSVGKVVGIHIGGNGRQGFCAGLKRSYFASEQ

SEQ ID NO: 523 - DNA, 549 bp, Human enterovirus
  CDS (1)..(549)
  misc_feature (1)..(549): n is c, g, a, t/u
  misc_feature (1)..(549): Human_Enterovirus_A71_Strain_C4_KP861243_3C(T87P)
ggcccgagccttgactttgctctctccctactgagaaggaacatcaggcaagtccaaacagaccaagggcatttcaccatgttgggtgttagggatcgcttagcagtcctcccacgccactcacaacctggcaaaaccatttggattgagcacaaactcgtgaacgtccttgatgcagttgaactggtggatgagcaaggagtcaacctggaattaaccctcatcactcttgacaccaacgaaaagtttagggatatcccnaaattcatcccagaaaatatcagcactgctagcgatgccaccctagtgatcaacacggagcacatgccatcaatgtttgtcccggtgggtgacgttgtgcagtatggctttttgaatctcagtggtaagcctacccatcgcaccatgatgtacaattttcctaccaaagcaggacagtgtggaggagtggtgacgtctgttgggaaggttgtcggtattcacattggtggcaatggcagacaaggtttttgcgcaggcctcaaaaggagttactttgctagtgaacaa

SEQ ID NO: 524 - protein, 183 aa, Human enterovirus
GPSLDFALSLLRRNIRQVQTDQGHFTMLGVRDRLAVLPRHSQPGKTIWIEHKLVNVLDAVELVDEQGVNLELTLITLDTNEKFRDIPKFIPENISTASDATLVINTEHMPSMFVPVGDVVQYGFLNLSGKPTHRTMMYNFPTKAGQCGGVVTSVGKVVGIHIGGNGRQGFCAGLKRSYFASEQ

SEQ ID NO: 525 - DNA, 549 bp, Human enterovirus
  CDS (1)..(549)
  misc_feature (1)..(549): Human_Enterovirus_A71_Strain_C4_KP861243_3C(wt)
ggcccgagccttgactttgctctctccctactgagaaggaacatcaggcaagtccaaacagaccaagggcatttcaccatgttgggtgttagggatcgcttagcagtcctcccacgccactcacaacctggcaaaaccatttggattgagcacaaactcgtgaacgtccttgatgcagttgaactggtggatgagcaaggagtcaacctggaattaaccctcatcactcttgacaccaacgaaaagtttagggatatcaccaaattcatcccagaaaatatcagcactgctagcgatgccaccctagtgatcaacacggagcacatgccatcaatgtttgtcccggtgggtgacgttgtgcagtatggctttttgaatctcagtggtaagcctacccatcgcaccatgatgtacaattttcctaccaaagcaggacagtgtggaggagtggtgacgtctgttgggaaggttgtcggtattcacattggtggcaatggcagacaaggtttttgcgcaggcctcaaaaggagttactttgctagtgaacaa

SEQ ID NO: 526 - protein, 183 aa, Human enterovirus
GPSLDFALSLLRRNIRQVQTDQGHFTMLGVRDRLAVLPRHSQPGKTIWIEHKLVNVLDAVELVDEQGVNLELTLITLDTNEKFRDITKFIPENISTASDATLVINTEHMPSMFVPVGDVVQYGFLNLSGKPTHRTMMYNFPTKAGQCGGVVTSVGKVVGIHIGGNGRQGFCAGLKRSYFASEQ

SEQ ID NO: 527 - DNA, 657 bp, Human hepatitus
  CDS (1)..(657)
  misc_feature (1)..(657): n is c, g, a, t/u
  misc_feature (1)..(657): Human_Hepatitis_A_Virus_NC001489_3C(E20P)
tcaactttggaaatagcaggactggttaggaagaacttggttcagtttggagttggaccnaagaatggatgtgtgagatgggttatgaatgccttgggagtgaaagatgattggctgcttgtgccttcccatgcttataaatttgagaaagattatgaaatgatggagttttattttaatagaggtggaacttactattcaatttcagctggtaatgttgttattcaatctttggatgtgggattccaggatgttgttctgatgaaggttcctacaattcctaagtttagagatattactcagcattttattaagaaaggggatgtgcctagagctttgaatcgcctggcaacattagtgacaactgtaaatggaacccctatgttaatttctgagggcccactaaagatggaagagaaagctacttatgttcataagaaaaatgatggtacaacagttgatttaactgtggatcaggcatggagaggaaaaggcgaaggtcttcctggaatgtgtggtggggccttggtttcatcgaatcaatctatacagaatgcaatcttgggcatccatgttgctggaggaaattcaattcttgttgcaaaattggttactcaagaaatgttccaaaatattgataagaaaattgaaagtcag

SEQ ID NO: 528 - protein, 219 aa, Human hepatitus
STLEIAGLVRKNLVQFGVGPKNGCVRWVMNALGVKDDWLLVPSHAYKFEKDYEMMEFYFNRGGTYYSISAGNVVIQSLDVGFQDVVLMKVPTIPKFRDITQHFIKKGDVPRALNRLATLVTTVNGTPMLISEGPLKMEEKATYVHKKNDGTTVDLTVDQAWRGKGEGLPGMCGGALVSSNQSIQNAILGIHVAGGNSILVAKLVTQEMFQNIDKKIESQ

SEQ ID NO: 529 - DNA, 657 bp, Human hepatitus
  CDS (1)..(657)
  misc_feature (1)..(657): n is c, g, a, t/u
  misc_feature (1)..(657): Human_Hepatitis_A_Virus_NC001489_3C(G19P)
tcaactttggaaatagcaggactggttaggaagaacttggttcagtttggagttccngagaagaatggatgtgtgagatgggttatgaatgccttgggagtgaaagatgattggctgcttgtgccttcccatgcttataaatttgagaaagattatgaaatgatggagttttattttaatagaggtggaacttactattcaatttcagctggtaatgttgttattcaatctttggatgtgggattccaggatgttgttctgatgaaggttcctacaattcctaagtttagagatattactcagcattttattaagaaaggggatgtgcctagagctttgaatcgcctggcaacattagtgacaactgtaaatggaacccctatgttaatttctgagggcccactaaagatggaagagaaagctacttatgttcataagaaaaatgatggtacaacagttgatttaactgtggatcaggcatggagaggaaaaggcgaaggtcttcctggaatgtgtggtggggccttggtttcatcgaatcaatctatacagaatgcaatcttgggcatccatgttgctggaggaaattcaattcttgttgcaaaattggttactcaagaaatgttccaaaatattgataagaaaattgaaagtcag

SEQ ID NO: 530 - protein, 219 aa, Human hepatitus
STLEIAGLVRKNLVQFGVPEKNGCVRWVMNALGVKDDWLLVPSHAYKFEKDYEMMEFYFNRGGTYYSISAGNVVIQSLDVGFQDVVLMKVPTIPKFRDITQHFIKKGDVPRALNRLATLVTTVNGTPMLISEGPLKMEEKATYVHKKNDGTTVDLTVDQAWRGKGEGLPGMCGGALVSSNQSIQNAILGIHVAGGNSILVAKLVTQEMFQNIDKKIESQ

SEQ ID NO: 531 - DNA, 657 bp, Human hepatitus
  CDS (1)..(657)
  misc_feature (1)..(657): n is c, g, a, t/u
  misc_feature (1)..(657): Human_Hepatitis_A_Virus_NC001489_3C(I130P)
tcaactttggaaatagcaggactggttaggaagaacttggttcagtttggagttggagagaagaatggatgtgtgagatgggttatgaatgccttgggagtgaaagatgattggctgcttgtgccttcccatgcttataaatttgagaaagattatgaaatgatggagttttattttaatagaggtggaacttactattcaatttcagctggtaatgttgttattcaatctttggatgtgggattccaggatgttgttctgatgaaggttcctacaattcctaagtttagagatattactcagcattttattaagaaaggggatgtgcctagagctttgaatcgcctggcaacattagtgacaactgtaaatggaacccctatgttaccntctgagggcccactaaagatggaagagaaagctacttatgttcataagaaaaatgatggtacaacagttgatttaactgtggatcaggcatggagaggaaaaggcgaaggtcttcctggaatgtgtggtggggccttggtttcatcgaatcaatctatacagaatgcaatcttgggcatccatgttgctggaggaaattcaattcttgttgcaaaattggttactcaagaaatgttccaaaatattgataagaaaattgaaagtcag

SEQ ID NO: 532 - protein, 219 aa, Human hepatitus
STLEIAGLVRKNLVQFGVGEKNGCVRWVMNALGVKDDWLLVPSHAYKFEKDYEMMEFYFNRGGTYYSISAGNVVIQSLDVGFQDVVLMKVPTIPKFRDITQHFIKKGDVPRALNRLATLVTTVNGTPMLPSEGPLKMEEKATYVHKKNDGTTVDLTVDQAWRGKGEGLPGMCGGALVSSNQSIQNAILGIHVAGGNSILVAKLVTQEMFQNIDKKIESQ

SEQ ID NO: 533 - DNA, 657 bp, Human hepatitus
  CDS (1)..(657)
  misc_feature (1)..(657): n is c, g, a, t/u
  misc_feature (1)..(657): Human_Hepatitis_A_Virus_NC001489_3C(M128P)
tcaactttggaaatagcaggactggttaggaagaacttggttcagtttggagttggagagaagaatggatgtgtgagatgggttatgaatgccttgggagtgaaagatgattggctgcttgtgccttcccatgcttataaatttgagaaagattatgaaatgatggagttttattttaatagaggtggaacttactattcaatttcagctggtaatgttgttattcaatctttggatgtgggattccaggatgttgttctgatgaaggttcctacaattcctaagtttagagatattactcagcattttattaagaaaggggatgtgcctagagctttgaatcgcctggcaacattagtgacaactgtaaatggaacccctccnttaatttctgagggcccactaaagatggaagagaaagctacttatgttcataagaaaaatgatggtacaacagttgatttaactgtggatcaggcatggagaggaaaaggcgaaggtcttcctggaatgtgtggtggggccttggtttcatcgaatcaatctatacagaatgcaatcttgggcatccatgttgctggaggaaattcaattcttgttgcaaaattggttactcaagaaatgttccaaaatattgataagaaaattgaaagtcag

SEQ ID NO: 534 - protein, 219 aa, Human hepatitus
STLEIAGLVRKNLVQFGVGEKNGCVRWVMNALGVKDDWLLVPSHAYKFEKDYEMMEFYFNRGGTYYSISAGNVVIQSLDVGFQDVVLMKVPTIPKFRDITQHFIKKGDVPRALNRLATLVTTVNGTPPLISEGPLKMEEKATYVHKKNDGTTVDLTVDQAWRGKGEGLPGMCGGALVSSNQSIQNAILGIHVAGGNSILVAKLVTQEMFQNIDKKIESQ

SEQ ID NO: 535 - DNA, 657 bp, Human hepatitus
  CDS (1)..(657)
  misc_feature (1)..(657): n is c, g, a, t/u
  misc_feature (1)..(657): Human_Hepatitis_A_Virus_NC001489_3C(T100P)
tcaactttggaaatagcaggactggttaggaagaacttggttcagtttggagttggagagaagaatggatgtgtgagatgggttatgaatgccttgggagtgaaagatgattggctgcttgtgccttcccatgcttataaatttgagaaagattatgaaatgatggagttttattttaatagaggtggaacttactattcaatttcagctggtaatgttgttattcaatctttggatgtgggattccaggatgttgttctgatgaaggttcctacaattcctaagtttagagatattccncagcattttattaagaaaggggatgtgcctagagctttgaatcgcctggcaacattagtgacaactgtaaatggaacccctatgttaatttctgagggcccactaaagatggaagagaaagctacttatgttcataagaaaaatgatggtacaacagttgatttaactgtggatcaggcatggagaggaaaaggcgaaggtcttcctggaatgtgtggtggggccttggtttcatcgaatcaatctatacagaatgcaatcttgggcatccatgttgctggaggaaattcaattcttgttgcaaaattggttactcaagaaatgttccaaaatattgataagaaaattgaaagtcag

SEQ ID NO: 536 - protein, 219 aa, Human hepatitus
STLEIAGLVRKNLVQFGVGEKNGCVRWVMNALGVKDDWLLVPSHAYKFEKDYEMMEFYFNRGGTYYSISAGNVVIQSLDVGFQDVVLMKVPTIPKFRDIPQHFIKKGDVPRALNRLATLVTTVNGTPMLISEGPLKMEEKATYVHKKNDGTTVDLTVDQAWRGKGEGLPGMCGGALVSSNQSIQNAILGIHVAGGNSILVAKLVTQEMFQNIDKKIESQ

SEQ ID NO: 537 - DNA, 657 bp, Human hepatitus
  CDS (1)..(657)
  misc_feature (1)..(657): Human_Hepatitis_A_Virus_NC001489_3C(wt)
tcaactttggaaatagcaggactggttaggaagaacttggttcagtttggagttggagagaagaatggatgtgtgagatgggttatgaatgccttgggagtgaaagatgattggctgcttgtgccttcccatgcttataaatttgagaaagattatgaaatgatggagttttattttaatagaggtggaacttactattcaatttcagctggtaatgttgttattcaatctttggatgtgggattccaggatgttgttctgatgaaggttcctacaattcctaagtttagagatattactcagcattttattaagaaaggggatgtgcctagagctttgaatcgcctggcaacattagtgacaactgtaaatggaacccctatgttaatttctgagggcccactaaagatggaagagaaagctacttatgttcataagaaaaatgatggtacaacagttgatttaactgtggatcaggcatggagaggaaaaggcgaaggtcttcctggaatgtgtggtggggccttggtttcatcgaatcaatctatacagaatgcaatcttgggcatccatgttgctggaggaaattcaattcttgttgcaaaattggttactcaagaaatgttccaaaatattgataagaaaattgaaagtcag

SEQ ID NO: 538 - protein, 219 aa, Human hepatitus
STLEIAGLVRKNLVQFGVGEKNGCVRWVMNALGVKDDWLLVPSHAYKFEKDYEMMEFYFNRGGTYYSISAGNVVIQSLDVGFQDVVLMKVPTIPKFRDITQHFIKKGDVPRALNRLATLVTTVNGTPMLISEGPLKMEEKATYVHKKNDGTTVDLTVDQAWRGKGEGLPGMCGGALVSSNQSIQNAILGIHVAGGNSILVAKLVTQEMFQNIDKKIESQ

SEQ ID NO: 539 - DNA, 549 bp, Human poliovirus
  CDS (1)..(549)
  misc_feature (1)..(549): n is c, g, a, t/u
  misc_feature (1)..(549): Human_Poliovirus_2_Strain_R93152_3C(I103P)
ggccctgggtttgattacgcagtggccatggctaaaagaaacattgttacagcaaccaccagcaaaggggagtttacgatgttgggagtctatgataatgtggccatcttgccaacccacgcctcacctggtgaaagcattgcgatcgacggtaaagaggtggaaattctcgacgccaaagcccttgaagatcaggcaggaactaatcttgaaattaccataattacactaaagaggaacgagaagttcagagatatcaggccacacattcccacccaaatcaccgaaacaaatgatggagttttgccngtgaacactagtaagtaccccaacatgtatgttcccgttggtgctgtgaccgaacaggggtatcttaatctcggtggacgacaaaccgctcgtacgctaatgtacaactttccaactagagcaggtcagtgtggtggtgtcatcacgtgcactggtaaagtcattgggatgcatgttggtgggaacggttcacatgggttcgcggcggccctaaagcggtcatacttcactcagattcaa

SEQ ID NO: 540 - protein, 183 aa, Human poliovirus
GPGFDYAVAMAKRNIVTATTSKGEFTMLGVYDNVAILPTHASPGESIAIDGKEVEILDAKALEDQAGTNLEITIITLKRNEKFRDIRPHIPTQITETNDGVLPVNTSKYPNMYVPVGAVTEQGYLNLGGRQTARTLMYNFPTRAGQCGGVITCTGKVIGMHVGGNGSHGFAAALKRSYFTQIQ

SEQ ID NO: 541 - DNA, 549 bp, Human poliovirus
  CDS (1)..(549)
  misc_feature (1)..(549): n is c, g, a, t/u
  misc_feature (1)..(549): Human_Poliovirus_2_Strain_R93152_3C(L102P)
ggccctgggtttgattacgcagtggccatggctaaaagaaacattgttacagcaaccaccagcaaaggggagtttacgatgttgggagtctatgataatgtggccatcttgccaacccacgcctcacctggtgaaagcattgcgatcgacggtaaagaggtggaaattctcgacgccaaagcccttgaagatcaggcaggaactaatcttgaaattaccataattacactaaagaggaacgagaagttcagagatatcaggccacacattcccacccaaatcaccgaaacaaatgatggagttccnatcgtgaacactagtaagtaccccaacatgtatgttcccgttggtgctgtgaccgaacaggggtatcttaatctcggtggacgacaaaccgctcgtacgctaatgtacaactttccaactagagcaggtcagtgtggtggtgtcatcacgtgcactggtaaagtcattgggatgcatgttggtgggaacggttcacatgggttcgcggcggccctaaagcggtcatacttcactcagattcaa

SEQ ID NO: 542 - protein, 183 aa, Human poliovirus
GPGFDYAVAMAKRNIVTATTSKGEFTMLGVYDNVAILPTHASPGESIAIDGKEVEILDAKALEDQAGTNLEITIITLKRNEKFRDIRPHIPTQITETNDGVPIVNTSKYPNMYVPVGAVTEQGYLNLGGRQTARTLMYNFPTRAGQCGGVITCTGKVIGMHVGGNGSHGFAAALKRSYFTQIQ

SEQ ID NO: 543 - DNA, 549 bp, Human poliovirus
  CDS (1)..(549)
  misc_feature (1)..(549): n is c, g, a, t/u
  misc_feature (1)..(549): Human_Poliovirus_2_Strain_R93152_3C(R87P)
ggccctgggtttgattacgcagtggccatggctaaaagaaacattgttacagcaaccaccagcaaaggggagtttacgatgttgggagtctatgataatgtggccatcttgccaacccacgcctcacctggtgaaagcattgcgatcgacggtaaagaggtggaaattctcgacgccaaagcccttgaagatcaggcaggaactaatcttgaaattaccataattacactaaagaggaacgagaagttcagagatatcccnccacacattcccacccaaatcaccgaaacaaatgatggagttttgatcgtgaacactagtaagtaccccaacatgtatgttcccgttggtgctgtgaccgaacaggggtatcttaatctcggtggacgacaaaccgctcgtacgctaatgtacaactttccaactagagcaggtcagtgtggtggtgtcatcacgtgcactggtaaagtcattgggatgcatgttggtgggaacggttcacatgggttcgcggcggccctaaagcggtcatacttcactcagattcaa

SEQ ID NO: 544 - protein, 183 aa, Human poliovirus
GPGFDYAVAMAKRNIVTATTSKGEFTMLGVYDNVAILPTHASPGESIAIDGKEVEILDAKALEDQAGTNLEITIITLKRNEKFRDIPPHIPTQITETNDGVLIVNTSKYPNMYVPVGAVTEQGYLNLGGRQTARTLMYNFPTRAGQCGGVITCTGKVIGMHVGGNGSHGFAAALKRSYFTQIQ

SEQ ID NO: 545 - DNA, 549 bp, Human poliovirus
  CDS (1)..(549)
  misc_feature (1)..(549): n is c, g, a, t/u
  misc_feature (1)..(549): Human_Poliovirus_2_Strain_R93152_3C(T19P)
ggccctgggtttgattacgcagtggccatggctaaaagaaacattgttacagcaccnaccagcaaaggggagtttacgatgttgggagtctatgataatgtggccatcttgccaacccacgcctcacctggtgaaagcattgcgatcgacggtaaagaggtggaaattctcgacgccaaagcccttgaagatcaggcaggaactaatcttgaaattaccataattacactaaagaggaacgagaagttcagagatatcaggccacacattcccacccaaatcaccgaaacaaatgatggagttttgatcgtgaacactagtaagtaccccaacatgtatgttcccgttggtgctgtgaccgaacaggggtatcttaatctcggtggacgacaaaccgctcgtacgctaatgtacaactttccaactagagcaggtcagtgtggtggtgtcatcacgtgcactggtaaagtcattgggatgcatgttggtgggaacggttcacatgggttcgcggcggccctaaagcggtcatacttcactcagattcaa

SEQ ID NO: 546 - protein, 183 aa, Human poliovirus
GPGFDYAVAMAKRNIVTAPTSKGEFTMLGVYDNVAILPTHASPGESIAIDGKEVEILDAKALEDQAGTNLEITIITLKRNEKFRDIRPHIPTQITETNDGVLIVNTSKYPNMYVPVGAVTEQGYLNLGGRQTARTLMYNFPTRAGQCGGVITCTGKVIGMHVGGNGSHGFAAALKRSYFTQIQ

SEQ ID NO: 547 - DNA, 549 bp, Human poliovirus
  CDS (1)..(549)
  misc_feature (1)..(549): n is c, g, a, t/u
  misc_feature (1)..(549): Human_Poliovirus_2_Strain_R93152_3C(T20P)
ggccctgggtttgattacgcagtggccatggctaaaagaaacattgttacagcaaccccnagcaaaggggagtttacgatgttgggagtctatgataatgtggccatcttgccaacccacgcctcacctggtgaaagcattgcgatcgacggtaaagaggtggaaattctcgacgccaaagcccttgaagatcaggcaggaactaatcttgaaattaccataattacactaaagaggaacgagaagttcagagatatcaggccacacattcccacccaaatcaccgaaacaaatgatggagttttgatcgtgaacactagtaagtaccccaacatgtatgttcccgttggtgctgtgaccgaacaggggtatcttaatctcggtggacgacaaaccgctcgtacgctaatgtacaactttccaactagagcaggtcagtgtggtggtgtcatcacgtgcactggtaaagtcattgggatgcatgttggtgggaacggttcacatgggttcgcggcggccctaaagcggtcatacttcactcagattcaa

SEQ ID NO: 548 - protein, 183 aa, Human poliovirus
GPGFDYAVAMAKRNIVTATPSKGEFTMLGVYDNVAILPTHASPGESIAIDGKEVEILDAKALEDQAGTNLEITIITLKRNEKFRDIRPHIPTQITETNDGVLIVNTSKYPNMYVPVGAVTEQGYLNLGGRQTARTLMYNFPTRAGQCGGVITCTGKVIGMHVGGNGSHGFAAALKRSYFTQIQ

SEQ ID NO: 549 - DNA, 549 bp, Human poliovirus
  CDS (1)..(549)
  misc_feature (1)..(549): n is c, g, a, t/u
  misc_feature (1)..(549): Human_Poliovirus_2_Strain_R93152_3C(V104P)
ggccctgggtttgattacgcagtggccatggctaaaagaaacattgttacagcaaccaccagcaaaggggagtttacgatgttgggagtctatgataatgtggccatcttgccaacccacgcctcacctggtgaaagcattgcgatcgacggtaaagaggtggaaattctcgacgccaaagcccttgaagatcaggcaggaactaatcttgaaattaccataattacactaaagaggaacgagaagttcagagatatcaggccacacattcccacccaaatcaccgaaacaaatgatggagttttgatcccnaacactagtaagtaccccaacatgtatgttcccgttggtgctgtgaccgaacaggggtatcttaatctcggtggacgacaaaccgctcgtacgctaatgtacaactttccaactagagcaggtcagtgtggtggtgtcatcacgtgcactggtaaagtcattgggatgcatgttggtgggaacggttcacatgggttcgcggcggccctaaagcggtcatacttcactcagattcaa

SEQ ID NO: 550 - protein, 183 aa, Human poliovirus
GPGFDYAVAMAKRNIVTATTSKGEFTMLGVYDNVAILPTHASPGESIAIDGKEVEILDAKALEDQAGTNLEITIITLKRNEKFRDIRPHIPTQITETNDGVLIPNTSKYPNMYVPVGAVTEQGYLNLGGRQTARTLMYNFPTRAGQCGGVITCTGKVIGMHVGGNGSHGFAAALKRSYFTQIQ

SEQ ID NO: 551 - DNA, 549 bp, Human poliovirus
  CDS (1)..(549)
  misc_feature (1)..(549): Human_Poliovirus_2_Strain_R93152_3C(wt)
ggccctgggtttgattacgcagtggccatggctaaaagaaacattgttacagcaaccaccagcaaaggggagtttacgatgttgggagtctatgataatgtggccatcttgccaacccacgcctcacctggtgaaagcattgcgatcgacggtaaagaggtggaaattctcgacgccaaagcccttgaagatcaggcaggaactaatcttgaaattaccataattacactaaagaggaacgagaagttcagagatatcaggccacacattcccacccaaatcaccgaaacaaatgatggagttttgatcgtgaacactagtaagtaccccaacatgtatgttcccgttggtgctgtgaccgaacaggggtatcttaatctcggtggacgacaaaccgctcgtacgctaatgtacaactttccaactagagcaggtcagtgtggtggtgtcatcacgtgcactggtaaagtcattgggatgcatgttggtgggaacggttcacatgggttcgcggcggccctaaagcggtcatacttcactcagattcaa

SEQ ID NO: 552 - protein, 183 aa, Human poliovirus
GPGFDYAVAMAKRNIVTATTSKGEFTMLGVYDNVAILPTHASPGESIAIDGKEVEILDAKALEDQAGTNLEITIITLKRNEKFRDIRPHIPTQITETNDGVLIVNTSKYPNMYVPVGAVTEQGYLNLGGRQTARTLMYNFPTRAGQCGGVITCTGKVIGMHVGGNGSHGFAAALKRSYFTQIQ

SEQ ID NO: 553 - DNA, 549 bp, Human poliovirus
  CDS (1)..(549)
  misc_feature (1)..(549): n is c, g, a, t/u
  misc_feature (1)..(549): Human_Poliovirus_3_Isolate_CHN5275/JX/CHN/2001_FJ859183_3C(I103P)
gggcctgggtttgactatgcagtggctatggctaaaagaaacattgttacagcaactactagcaaaggggagttcacaatgctaggagtccacgacaacgtggccattttgccaactcatgcctcacctggtgagagtattgtaattgatggcaaagaggttgaaatcctagacgctaaagccctcgaagatcaggcaggcactaatctggaaatcaccataataaccctcaaaagaaatgaaaagttcagagatatcagacaacacatacccactcaaatcaccgagacgaatgatggagttctgccngtgaacactagtaagtaccccaacatgtacgttcctgtcggtgctgtgactgagcagggatacctaaatctcggtgggcgccagactgctcgtactctaatgtacaactttccaaccagagctggtcagtgtggtggagtcatcacatgcactgggaaagtcatcgggatgcacgttggtgggaatggttcacatgggtttgcagcggccctgaagcggtcatacttcactcagagccaa

SEQ ID NO: 554 - protein, 183 aa, Human poliovirus
GPGFDYAVAMAKRNIVTATTSKGEFTMLGVHDNVAILPTHASPGESIVIDGKEVEILDAKALEDQAGTNLEITIITLKRNEKFRDIRQHIPTQITETNDGVLPVNTSKYPNMYVPVGAVTEQGYLNLGGRQTARTLMYNFPTRAGQCGGVITCTGKVIGMHVGGNGSHGFAAALKRSYFTQSQ

SEQ ID NO: 555 - DNA, 549 bp, Human poliovirus
  CDS (1)..(549)
  misc_feature (1)..(549): n is c, g, a, t/u
  misc_feature (1)..(549): Human_Poliovirus_3_Isolate_CHN5275/JX/CHN/2001_FJ859183_3C(L102P)
gggcctgggtttgactatgcagtggctatggctaaaagaaacattgttacagcaactactagcaaaggggagttcacaatgctaggagtccacgacaacgtggccattttgccaactcatgcctcacctggtgagagtattgtaattgatggcaaagaggttgaaatcctagacgctaaagccctcgaagatcaggcaggcactaatctggaaatcaccataataaccctcaaaagaaatgaaaagttcagagatatcagacaacacatacccactcaaatcaccgagacgaatgatggagttccnattgtgaacactagtaagtaccccaacatgtacgttcctgtcggtgctgtgactgagcagggatacctaaatctcggtgggcgccagactgctcgtactctaatgtacaactttccaaccagagctggtcagtgtggtggagtcatcacatgcactgggaaagtcatcgggatgcacgttggtgggaatggttcacatgggtttgcagcggccctgaagcggtcatacttcactcagagccaa

SEQ ID NO: 556 - protein, 183 aa, Human poliovirus
GPGFDYAVAMAKRNIVTATTSKGEFTMLGVHDNVAILPTHASPGESIVIDGKEVEILDAKALEDQAGTNLEITIITLKRNEKFRDIRQHIPTQITETNDGVPIVNTSKYPNMYVPVGAVTEQGYLNLGGRQTARTLMYNFPTRAGQCGGVITCTGKVIGMHVGGNGSHGFAAALKRSYFTQSQ

SEQ ID NO: 557 - DNA, 549 bp, Human poliovirus
  CDS (1)..(549)
  misc_feature (1)..(549): n is c, g, a, t/u
  misc_feature (1)..(549): Human_Poliovirus_3_Isolate_CHN5275/JX/CHN/2001_FJ859183_3C(R87P)
gggcctgggtttgactatgcagtggctatggctaaaagaaacattgttacagcaactactagcaaaggggagttcacaatgctaggagtccacgacaacgtggccattttgccaactcatgcctcacctggtgagagtattgtaattgatggcaaagaggttgaaatcctagacgctaaagccctcgaagatcaggcaggcactaatctggaaatcaccataataaccctcaaaagaaatgaaaagttcagagatatcccncaacacatacccactcaaatcaccgagacgaatgatggagttctgattgtgaacactagtaagtaccccaacatgtacgttcctgtcggtgctgtgactgagcagggatacctaaatctcggtgggcgccagactgctcgtactctaatgtacaactttccaaccagagctggtcagtgtggtggagtcatcacatgcactgggaaagtcatcgggatgcacgttggtgggaatggttcacatgggtttgcagcggccctgaagcggtcatacttcactcagagccaa

SEQ ID NO: 558 - protein, 183 aa, Human poliovirus
GPGFDYAVAMAKRNIVTATTSKGEFTMLGVHDNVAILPTHASPGESIVIDGKEVEILDAKALEDQAGTNLEITIITLKRNEKFRDIPQHIPTQITETNDGVLIVNTSKYPNMYVPVGAVTEQGYLNLGGRQTARTLMYNFPTRAGQCGGVITCTGKVIGMHVGGNGSHGFAAALKRSYFTQSQ

SEQ ID NO: 559 - DNA, 549 bp, Human poliovirus
  CDS (1)..(549)
  misc_feature (1)..(549): n is c, g, a, t/u
  misc_feature (1)..(549): Human_Poliovirus_3_Isolate_CHN5275/JX/CHN/2001_FJ859183_3C(T19P)
gggcctgggtttgactatgcagtggctatggctaaaagaaacattgttacagcaccnactagcaaaggggagttcacaatgctaggagtccacgacaacgtggccattttgccaactcatgcctcacctggtgagagtattgtaattgatggcaaagaggttgaaatcctagacgctaaagccctcgaagatcaggcaggcactaatctggaaatcaccataataaccctcaaaagaaatgaaaagttcagagatatcagacaacacatacccactcaaatcaccgagacgaatgatggagttctgattgtgaacactagtaagtaccccaacatgtacgttcctgtcggtgctgtgactgagcagggatacctaaatctcggtgggcgccagactgctcgtactctaatgtacaactttccaaccagagctggtcagtgtggtggagtcatcacatgcactgggaaagtcatcgggatgcacgttggtgggaatggttcacatgggtttgcagcggccctgaagcggtcatacttcactcagagccaa

SEQ ID NO: 560 - protein, 183 aa, Human poliovirus
GPGFDYAVAMAKRNIVTAPTSKGEFTMLGVHDNVAILPTHASPGESIVIDGKEVEILDAKALEDQAGTNLEITIITLKRNEKFRDIRQHIPTQITETNDGVLIVNTSKYPNMYVPVGAVTEQGYLNLGGRQTARTLMYNFPTRAGQCGGVITCTGKVIGMHVGGNGSHGFAAALKRSYFTQSQ

SEQ ID NO: 561 - DNA, 549 bp, Human poliovirus
  CDS (1)..(549)
  misc_feature (1)..(549): n is c, g, a, t/u
  misc_feature (1)..(549): Human_Poliovirus_3_Isolate_CHN5275/JX/CHN/2001_FJ859183_3C(T20P)
gggcctgggtttgactatgcagtggctatggctaaaagaaacattgttacagcaactccnagcaaaggggagttcacaatgctaggagtccacgacaacgtggccattttgccaactcatgcctcacctggtgagagtattgtaattgatggcaaagaggttgaaatcctagacgctaaagccctcgaagatcaggcaggcactaatctggaaatcaccataataaccctcaaaagaaatgaaaagttcagagatatcagacaacacatacccactcaaatcaccgagacgaatgatggagttctgattgtgaacactagtaagtaccccaacatgtacgttcctgtcggtgctgtgactgagcagggatacctaaatctcggtgggcgccagactgctcgtactctaatgtacaactttccaaccagagctggtcagtgtggtggagtcatcacatgcactgggaaagtcatcgggatgcacgttggtgggaatggttcacatgggtttgcagcggccctgaagcggtcatacttcactcagagccaa

SEQ ID NO: 562 - protein, 183 aa, Human poliovirus
GPGFDYAVAMAKRNIVTATPSKGEFTMLGVHDNVAILPTHASPGESIVIDGKEVEILDAKALEDQAGTNLEITIITLKRNEKFRDIRQHIPTQITETNDGVLIVNTSKYPNMYVPVGAVTEQGYLNLGGRQTARTLMYNFPTRAGQCGGVITCTGKVIGMHVGGNGSHGFAAALKRSYFTQSQ

SEQ ID NO: 563 - DNA, 549 bp, Human poliovirus
  CDS (1)..(549)
  misc_feature (1)..(549): n is c, g, a, t/u
  misc_feature (1)..(549): Human_Poliovirus_3_Isolate_CHN5275/JX/CHN/2001_FJ859183_3C(V104P)
gggcctgggtttgactatgcagtggctatggctaaaagaaacattgttacagcaactactagcaaaggggagttcacaatgctaggagtccacgacaacgtggccattttgccaactcatgcctcacctggtgagagtattgtaattgatggcaaagaggttgaaatcctagacgctaaagccctcgaagatcaggcaggcactaatctggaaatcaccataataaccctcaaaagaaatgaaaagttcagagatatcagacaacacatacccactcaaatcaccgagacgaatgatggagttctgattccnaacactagtaagtaccccaacatgtacgttcctgtcggtgctgtgactgagcagggatacctaaatctcggtgggcgccagactgctcgtactctaatgtacaactttccaaccagagctggtcagtgtggtggagtcatcacatgcactgggaaagtcatcgggatgcacgttggtgggaatggttcacatgggtttgcagcggccctgaagcggtcatacttcactcagagccaa

SEQ ID NO: 564 - protein, 183 aa, Human poliovirus
GPGFDYAVAMAKRNIVTATTSKGEFTMLGVHDNVAILPTHASPGESIVIDGKEVEILDAKALEDQAGTNLEITIITLKRNEKFRDIRQHIPTQITETNDGVLIPNTSKYPNMYVPVGAVTEQGYLNLGGRQTARTLMYNFPTRAGQCGGVITCTGKVIGMHVGGNGSHGFAAALKRSYFTQSQ

SEQ ID NO: 565 - DNA, 549 bp, Human poliovirus
  CDS (1)..(549)
  misc_feature (1)..(549): Human_Poliovirus_3_Isolate_CHN5275/JX/CHN/2001_FJ859183_3C(wt)
gggcctgggtttgactatgcagtggctatggctaaaagaaacattgttacagcaactactagcaaaggggagttcacaatgctaggagtccacgacaacgtggccattttgccaactcatgcctcacctggtgagagtattgtaattgatggcaaagaggttgaaatcctagacgctaaagccctcgaagatcaggcaggcactaatctggaaatcaccataataaccctcaaaagaaatgaaaagttcagagatatcagacaacacatacccactcaaatcaccgagacgaatgatggagttctgattgtgaacactagtaagtaccccaacatgtacgttcctgtcggtgctgtgactgagcagggatacctaaatctcggtgggcgccagactgctcgtactctaatgtacaactttccaaccagagctggtcagtgtggtggagtcatcacatgcactgggaaagtcatcgggatgcacgttggtgggaatggttcacatgggtttgcagcggccctgaagcggtcatacttcactcagagccaa

SEQ ID NO: 566 - protein, 183 aa, Human poliovirus
GPGFDYAVAMAKRNIVTATTSKGEFTMLGVHDNVAILPTHASPGESIVIDGKEVEILDAKALEDQAGTNLEITIITLKRNEKFRDIRQHIPTQITETNDGVLIVNTSKYPNMYVPVGAVTEQGYLNLGGRQTARTLMYNFPTRAGQCGGVITCTGKVIGMHVGGNGSHGFAAALKRSYFTQSQ

SEQ ID NO: 567 - DNA, 549 bp, Human poliovirus
  CDS (1)..(549)
  misc_feature (1)..(549): n is c, g, a, t/u
  misc_feature (1)..(549): Human_Poliovirus_Mahoney_3C(I103P)
ggaccagggttcgattacgcagtggctatggctaaaagaaacattgttacagcaactactagcaagggagagttcactatgttaggagtccacgacaacgtggctattttaccaacccacgcttcacctggtgaaagcattgtgatcgatggcaaagaagtggagatcttggatgccaaagcgctcgaagatcaagcaggaaccaatcttgaaatcactataatcactctaaagagaaatgaaaagttcagagacattagaccacatatacctactcaaatcactgagacaaatgatggagtcttgccngtgaacactagcaagtaccccaatatgtatgttcctgtcggtgctgtgactgaacagggatatctaaatctcggtgggcgccaaactgctcgtactctaatgtacaactttccaaccagagcaggacagtgtggtggagtcatcacatgtactgggaaagtcatcgggatgcatgttggtgggaacggttcacacgggtttgcagcggccctgaagcgatcatacttcactcagagtcaa

SEQ ID NO: 568 - protein, 183 aa, Human poliovirus
GPGFDYAVAMAKRNIVTATTSKGEFTMLGVHDNVAILPTHASPGESIVIDGKEVEILDAKALEDQAGTNLEITIITLKRNEKFRDIRPHIPTQITETNDGVLPVNTSKYPNMYVPVGAVTEQGYLNLGGRQTARTLMYNFPTRAGQCGGVITCTGKVIGMHVGGNGSHGFAAALKRSYFTQSQ

SEQ ID NO: 569 - DNA, 549 bp, Human poliovirus
  CDS (1)..(549)
  misc_feature (1)..(549): n is c, g, a, t/u
  misc_feature (1)..(549): Human_Poliovirus_Mahoney_3C(L102P)
ggaccagggttcgattacgcagtggctatggctaaaagaaacattgttacagcaactactagcaagggagagttcactatgttaggagtccacgacaacgtggctattttaccaacccacgcttcacctggtgaaagcattgtgatcgatggcaaagaagtggagatcttggatgccaaagcgctcgaagatcaagcaggaaccaatcttgaaatcactataatcactctaaagagaaatgaaaagttcagagacattagaccacatatacctactcaaatcactgagacaaatgatggagtcccnatcgtgaacactagcaagtaccccaatatgtatgttcctgtcggtgctgtgactgaacagggatatctaaatctcggtgggcgccaaactgctcgtactctaatgtacaactttccaaccagagcaggacagtgtggtggagtcatcacatgtactgggaaagtcatcgggatgcatgttggtgggaacggttcacacgggtttgcagcggccctgaagcgatcatacttcactcagagtcaa

SEQ ID NO: 570 - protein, 183 aa, Human poliovirus
GPGFDYAVAMAKRNIVTATTSKGEFTMLGVHDNVAILPTHASPGESIVIDGKEVEILDAKALEDQAGTNLEITIITLKRNEKFRDIRPHIPTQITETNDGVPIVNTSKYPNMYVPVGAVTEQGYLNLGGRQTARTLMYNFPTRAGQCGGVITCTGKVIGMHVGGNGSHGFAAALKRSYFTQSQ

SEQ ID NO: 571 - DNA, 549 bp, Human poliovirus
  CDS (1)..(549)
  misc_feature (1)..(549): n is c, g, a, t/u
  misc_feature (1)..(549): Human_Poliovirus_Mahoney_3C(R87P)
ggaccagggttcgattacgcagtggctatggctaaaagaaacattgttacagcaactactagcaagggagagttcactatgttaggagtccacgacaacgtggctattttaccaacccacgcttcacctggtgaaagcattgtgatcgatggcaaagaagtggagatcttggatgccaaagcgctcgaagatcaagcaggaaccaatcttgaaatcactataatcactctaaagagaaatgaaaagttcagagacattccnccacatatacctactcaaatcactgagacaaatgatggagtcttgatcgtgaacactagcaagtaccccaatatgtatgttcctgtcggtgctgtgactgaacagggatatctaaatctcggtgggcgccaaactgctcgtactctaatgtacaactttccaaccagagcaggacagtgtggtggagtcatcacatgtactgggaaagtcatcgggatgcatgttggtgggaacggttcacacgggtttgcagcggccctgaagcgatcatacttcactcagagtcaa

SEQ ID NO: 572 - protein, 183 aa, Human poliovirus
GPGFDYAVAMAKRNIVTATTSKGEFTMLGVHDNVAILPTHASPGESIVIDGKEVEILDAKALEDQAGTNLEITIITLKRNEKFRDIPPHIPTQITETNDGVLIVNTSKYPNMYVPVGAVTEQGYLNLGGRQTARTLMYNFPTRAGQCGGVITCTGKVIGMHVGGNGSHGFAAALKRSYFTQSQ

SEQ ID NO: 573 - DNA, 549 bp, Human poliovirus
  CDS (1)..(549)
  misc_feature (1)..(549): n is c, g, a, t/u
  misc_feature (1)..(549): Human_Poliovirus_Mahoney_3C(T19P)
ggaccagggttcgattacgcagtggctatggctaaaagaaacattgttacagcaccnactagcaagggagagttcactatgttaggagtccacgacaacgtggctattttaccaacccacgcttcacctggtgaaagcattgtgatcgatggcaaagaagtggagatcttggatgccaaagcgctcgaagatcaagcaggaaccaatcttgaaatcactataatcactctaaagagaaatgaaaagttcagagacattagaccacatatacctactcaaatcactgagacaaatgatggagtcttgatcgtgaacactagcaagtaccccaatatgtatgttcctgtcggtgctgtgactgaacagggatatctaaatctcggtgggcgccaaactgctcgtactctaatgtacaactttccaaccagagcaggacagtgtggtggagtcatcacatgtactgggaaagtcatcgggatgcatgttggtgggaacggttcacacgggtttgcagcggccctgaagcgatcatacttcactcagagtcaa

SEQ ID NO: 574 - protein, 183 aa, Human poliovirus
GPGFDYAVAMAKRNIVTAPTSKGEFTMLGVHDNVAILPTHASPGESIVIDGKEVEILDAKALEDQAGTNLEITIITLKRNEKFRDIRPHIPTQITETNDGVLIVNTSKYPNMYVPVGAVTEQGYLNLGGRQTARTLMYNFPTRAGQCGGVITCTGKVIGMHVGGNGSHGFAAALKRSYFTQSQ

SEQ ID NO: 575 - DNA, 549 bp, Human poliovirus
  CDS (1)..(549)
  misc_feature (1)..(549): n is c, g, a, t/u
  misc_feature (1)..(549): Human_Poliovirus_Mahoney_3C(T20P)
ggaccagggttcgattacgcagtggctatggctaaaagaaacattgttacagcaactccnagcaagggagagttcactatgttaggagtccacgacaacgtggctattttaccaacccacgcttcacctggtgaaagcattgtgatcgatggcaaagaagtggagatcttggatgccaaagcgctcgaagatcaagcaggaaccaatcttgaaatcactataatcactctaaagagaaatgaaaagttcagagacattagaccacatatacctactcaaatcactgagacaaatgatggagtcttgatcgtgaacactagcaagtaccccaatatgtatgttcctgtcggtgctgtgactgaacagggatatctaaatctcggtgggcgccaaactgctcgtactctaatgtacaactttccaaccagagcaggacagtgtggtggagtcatcacatgtactgggaaagtcatcgggatgcatgttggtgggaacggttcacacgggtttgcagcggccctgaagcgatcatacttcactcagagtcaa

SEQ ID NO: 576 - protein, 183 aa, Human poliovirus
GPGFDYAVAMAKRNIVTATPSKGEFTMLGVHDNVAILPTHASPGESIVIDGKEVEILDAKALEDQAGTNLEITIITLKRNEKFRDIRPHIPTQITETNDGVLIVNTSKYPNMYVPVGAVTEQGYLNLGGRQTARTLMYNFPTRAGQCGGVITCTGKVIGMHVGGNGSHGFAAALKRSYFTQSQ

SEQ ID NO: 577 - DNA, 549 bp, Human poliovirus
  CDS (1)..(549)
  misc_feature (1)..(549): n is c, g, a, t/u
  misc_feature (1)..(549): Human_Poliovirus_Mahoney_3C(V104P)
ggaccagggttcgattacgcagtggctatggctaaaagaaacattgttacagcaactactagcaagggagagttcactatgttaggagtccacgacaacgtggctattttaccaacccacgcttcacctggtgaaagcattgtgatcgatggcaaagaagtggagatcttggatgccaaagcgctcgaagatcaagcaggaaccaatcttgaaatcactataatcactctaaagagaaatgaaaagttcagagacattagaccacatatacctactcaaatcactgagacaaatgatggagtcttgatcccnaacactagcaagtaccccaatatgtatgttcctgtcggtgctgtgactgaacagggatatctaaatctcggtgggcgccaaactgctcgtactctaatgtacaactttccaaccagagcaggacagtgtggtggagtcatcacatgtactgggaaagtcatcgggatgcatgttggtgggaacggttcacacgggtttgcagcggccctgaagcgatcatacttcactcagagtcaa

SEQ ID NO: 578 - protein, 183 aa, Human poliovirus
GPGFDYAVAMAKRNIVTATTSKGEFTMLGVHDNVAILPTHASPGESIVIDGKEVEILDAKALEDQAGTNLEITIITLKRNEKFRDIRPHIPTQITETNDGVLIPNTSKYPNMYVPVGAVTEQGYLNLGGRQTARTLMYNFPTRAGQCGGVITCTGKVIGMHVGGNGSHGFAAALKRSYFTQSQ

SEQ ID NO: 579 - DNA, 549 bp, Human poliovirus
  CDS (1)..(549)
  misc_feature (1)..(549): Human_Poliovirus_Mahoney_3C(wt)
ggaccagggttcgattacgcagtggctatggctaaaagaaacattgttacagcaactactagcaagggagagttcactatgttaggagtccacgacaacgtggctattttaccaacccacgcttcacctggtgaaagcattgtgatcgatggcaaagaagtggagatcttggatgccaaagcgctcgaagatcaagcaggaaccaatcttgaaatcactataatcactctaaagagaaatgaaaagttcagagacattagaccacatatacctactcaaatcactgagacaaatgatggagtcttgatcgtgaacactagcaagtaccccaatatgtatgttcctgtcggtgctgtgactgaacagggatatctaaatctcggtgggcgccaaactgctcgtactctaatgtacaactttccaaccagagcaggacagtgtggtggagtcatcacatgtactgggaaagtcatcgggatgcatgttggtgggaacggttcacacgggtttgcagcggccctgaagcgatcatacttcactcagagtcaa

SEQ ID NO: 580 - protein, 183 aa, Human poliovirus
GPGFDYAVAMAKRNIVTATTSKGEFTMLGVHDNVAILPTHASPGESIVIDGKEVEILDAKALEDQAGTNLEITIITLKRNEKFRDIRPHIPTQITETNDGVLIVNTSKYPNMYVPVGAVTEQGYLNLGGRQTARTLMYNFPTRAGQCGGVITCTGKVIGMHVGGNGSHGFAAALKRSYFTQSQ

SEQ ID NO: 581 - DNA, 546 bp, Human rhinovirus
  CDS (1)..(546)
  misc_feature (1)..(546): n is c, g, a, t/u
  misc_feature (1)..(546): Human_Rhinovirus_14_NC001490_3C(E114P)
ggaccaaacacagaatttgcactatccctgttaaggaaaaacataatgactataacaacctcaaagggagagttcacagggttaggcatacatgatcgtgtctgtgtgatacccacacacgcacagcctggtgatgatgtactagtgaatggtcagaaaattagagttaaggataagtacaaattagtagatccagagaacattaatctagagcttacagtgttgactttagatagaaatgaaaaattcagagatatcaggggatttatatcagaagatctagaaggtgtggatgccactttggtagtacattcaaataactttaccaacactatcttaccngttggccctgtaacaatggcaggacttattaatttgagtagcacccccactaacagaatgattcgttatgattatgcaacaaaaactgggcagtgtggaggtgtgctgtgtgctactggtaagatctttggtattcatgttggcggtaatggaagacaaggattttcagctcaacttaaaaaacaatattttgtagagaaacaa

SEQ ID NO: 582 - protein, 182 aa, Human rhinovirus
GPNTEFALSLLRKNIMTITTSKGEFTGLGIHDRVCVIPTHAQPGDDVLVNGQKIRVKDKYKLVDPENINLELTVLTLDRNEKFRDIRGFISEDLEGVDATLVVHSNNFTNTILPVGPVTMAGLINLSSTPTNRMIRYDYATKTGQCGGVLCATGKIFGIHVGGNGRQGFSAQLKKQYFVEKQ

SEQ ID NO: 583 - DNA, 546 bp, Human rhinovirus
  CDS (1)..(546)
  misc_feature (1)..(546): n is c, g, a, t/u
  misc_feature (1)..(546): Human_Rhinovirus_14_NC001490_3C(G88P)
ggaccaaacacagaatttgcactatccctgttaaggaaaaacataatgactataacaacctcaaagggagagttcacagggttaggcatacatgatcgtgtctgtgtgatacccacacacgcacagcctggtgatgatgtactagtgaatggtcagaaaattagagttaaggataagtacaaattagtagatccagagaacattaatctagagcttacagtgttgactttagatagaaatgaaaaattcagagatatcaggccntttatatcagaagatctagaaggtgtggatgccactttggtagtacattcaaataactttaccaacactatcttagaagttggccctgtaacaatggcaggacttattaatttgagtagcacccccactaacagaatgattcgttatgattatgcaacaaaaactgggcagtgtggaggtgtgctgtgtgctactggtaagatctttggtattcatgttggcggtaatggaagacaaggattttcagctcaacttaaaaaacaatattttgtagagaaacaa

SEQ ID NO: 584 - protein, 182 aa, Human rhinovirus
GPNTEFALSLLRKNIMTITTSKGEFTGLGIHDRVCVIPTHAQPGDDVLVNGQKIRVKDKYKLVDPENINLELTVLTLDRNEKFRDIRPFISEDLEGVDATLVVHSNNFTNTILEVGPVTMAGLINLSSTPTNRMIRYDYATKTGQCGGVLCATGKIFGIHVGGNGRQGFSAQLKKQYFVEKQ

SEQ ID NO: 585 - DNA, 546 bp, Human rhinovirus
  CDS (1)..(546)
  misc_feature (1)..(546): n is c, g, a, t/u
  misc_feature (1)..(546): Human_Rhinovirus_14_NC001490_3C(I112P)
ggaccaaacacagaatttgcactatccctgttaaggaaaaacataatgactataacaacctcaaagggagagttcacagggttaggcatacatgatcgtgtctgtgtgatacccacacacgcacagcctggtgatgatgtactagtgaatggtcagaaaattagagttaaggataagtacaaattagtagatccagagaacattaatctagagcttacagtgttgactttagatagaaatgaaaaattcagagatatcaggggatttatatcagaagatctagaaggtgtggatgccactttggtagtacattcaaataactttaccaacactccnttagaagttggccctgtaacaatggcaggacttattaatttgagtagcacccccactaacagaatgattcgttatgattatgcaacaaaaactgggcagtgtggaggtgtgctgtgtgctactggtaagatctttggtattcatgttggcggtaatggaagacaaggattttcagctcaacttaaaaaacaatattttgtagagaaacaa

SEQ ID NO: 586 - protein, 182 aa, Human rhinovirus
GPNTEFALSLLRKNIMTITTSKGEFTGLGIHDRVCVIPTHAQPGDDVLVNGQKIRVKDKYKLVDPENINLELTVLTLDRNEKFRDIRGFISEDLEGVDATLVVHSNNFTNTPLEVGPVTMAGLINLSSTPTNRMIRYDYATKTGQCGGVLCATGKIFGIHVGGNGRQGFSAQLKKQYFVEKQ

SEQ ID NO: 587 - DNA, 546 bp, Human rhinovirus
  CDS (1)..(546)
  misc_feature (1)..(546): n is c, g, a, t/u
  misc_feature (1)..(546): Human_Rhinovirus_14_NC001490(R87P)
ggaccaaacacagaatttgcactatccctgttaaggaaaaacataatgactataacaacctcaaagggagagttcacagggttaggcatacatgatcgtgtctgtgtgatacccacacacgcacagcctggtgatgatgtactagtgaatggtcagaaaattagagttaaggataagtacaaattagtagatccagagaacattaatctagagcttacagtgttgactttagatagaaatgaaaaattcagagatatcccnggatttatatcagaagatctagaaggtgtggatgccactttggtagtacattcaaataactttaccaacactatcttagaagttggccctgtaacaatggcaggacttattaatttgagtagcacccccactaacagaatgattcgttatgattatgcaacaaaaactgggcagtgtggaggtgtgctgtgtgctactggtaagatctttggtattcatgttggcggtaatggaagacaaggattttcagctcaacttaaaaaacaatattttgtagagaaacaa

SEQ ID NO: 588 - protein, 182 aa, Human rhinovirus
GPNTEFALSLLRKNIMTITTSKGEFTGLGIHDRVCVIPTHAQPGDDVLVNGQKIRVKDKYKLVDPENINLELTVLTLDRNEKFRDIPGFISEDLEGVDATLVVHSNNFTNTILEVGPVTMAGLINLSSTPTNRMIRYDYATKTGQCGGVLCATGKIFGIHVGGNGRQGFSAQLKKQYFVEKQ

SEQ ID NO: 589 - DNA, 546 bp, Human rhinovirus
  CDS (1)..(546)
  misc_feature (1)..(546): n is c, g, a, t/u
  misc_feature (1)..(546): Human_Rhinovirus_14_NC001490_3C(T19P)
ggaccaaacacagaatttgcactatccctgttaaggaaaaacataatgactataccnacctcaaagggagagttcacagggttaggcatacatgatcgtgtctgtgtgatacccacacacgcacagcctggtgatgatgtactagtgaatggtcagaaaattagagttaaggataagtacaaattagtagatccagagaacattaatctagagcttacagtgttgactttagatagaaatgaaaaattcagagatatcaggggatttatatcagaagatctagaaggtgtggatgccactttggtagtacattcaaataactttaccaacactatcttagaagttggccctgtaacaatggcaggacttattaatttgagtagcacccccactaacagaatgattcgttatgattatgcaacaaaaactgggcagtgtggaggtgtgctgtgtgctactggtaagatctttggtattcatgttggcggtaatggaagacaaggattttcagctcaacttaaaaaacaatattttgtagagaaacaa

SEQ ID NO: 590 - protein, 182 aa, Human rhinovirus
GPNTEFALSLLRKNIMTIPTSKGEFTGLGIHDRVCVIPTHAQPGDDVLVNGQKIRVKDKYKLVDPENINLELTVLTLDRNEKFRDIRGFISEDLEGVDATLVVHSNNFTNTILEVGPVTMAGLINLSSTPTNRMIRYDYATKTGQCGGVLCATGKIFGIHVGGNGRQGFSAQLKKQYFVEKQ

SEQ ID NO: 591 - DNA, 546 bp, Human rhinovirus
  CDS (1)..(546)
  misc_feature (1)..(546): n is c, g, a, t/u
  misc_feature (1)..(546): Human_Rhinovirus_14_NC001490_3C(T20P)
ggaccaaacacagaatttgcactatccctgttaaggaaaaacataatgactataacaccntcaaagggagagttcacagggttaggcatacatgatcgtgtctgtgtgatacccacacacgcacagcctggtgatgatgtactagtgaatggtcagaaaattagagttaaggataagtacaaattagtagatccagagaacattaatctagagcttacagtgttgactttagatagaaatgaaaaattcagagatatcaggggatttatatcagaagatctagaaggtgtggatgccactttggtagtacattcaaataactttaccaacactatcttagaagttggccctgtaacaatggcaggacttattaatttgagtagcacccccactaacagaatgattcgttatgattatgcaacaaaaactgggcagtgtggaggtgtgctgtgtgctactggtaagatctttggtattcatgttggcggtaatggaagacaaggattttcagctcaacttaaaaaacaatattttgtagagaaacaa

SEQ ID NO: 592 - protein, 182 aa, Human rhinovirus
GPNTEFALSLLRKNIMTITPSKGEFTGLGIHDRVCVIPTHAQPGDDVLVNGQKIRVKDKYKLVDPENINLELTVLTLDRNEKFRDIRGFISEDLEGVDATLVVHSNNFTNTILEVGPVTMAGLINLSSTPTNRMIRYDYATKTGQCGGVLCATGKIFGIHVGGNGRQGFSAQLKKQYFVEKQ

SEQ ID NO: 593 - DNA, 546 bp, Human rhinovirus
  CDS (1)..(546)
  misc_feature (1)..(546): Human_Rhinovirus_14_NC001490_3C(wt)
ggaccaaacacagaatttgcactatccctgttaaggaaaaacataatgactataacaacctcaaagggagagttcacagggttaggcatacatgatcgtgtctgtgtgatacccacacacgcacagcctggtgatgatgtactagtgaatggtcagaaaattagagttaaggataagtacaaattagtagatccagagaacattaatctagagcttacagtgttgactttagatagaaatgaaaaattcagagatatcaggggatttatatcagaagatctagaaggtgtggatgccactttggtagtacattcaaataactttaccaacactatcttagaagttggccctgtaacaatggcaggacttattaatttgagtagcacccccactaacagaatgattcgttatgattatgcaacaaaaactgggcagtgtggaggtgtgctgtgtgctactggtaagatctttggtattcatgttggcggtaatggaagacaaggattttcagctcaacttaaaaaacaatattttgtagagaaacaa

SEQ ID NO: 594 - protein, 182 aa, Human rhinovirus
GPNTEFALSLLRKNIMTITTSKGEFTGLGIHDRVCVIPTHAQPGDDVLVNGQKIRVKDKYKLVDPENINLELTVLTLDRNEKFRDIRGFISEDLEGVDATLVVHSNNFTNTILEVGPVTMAGLINLSSTPTNRMIRYDYATKTGQCGGVLCATGKIFGIHVGGNGRQGFSAQLKKQYFVEKQ

SEQ ID NO: 595 - DNA, 549 bp, Human rhinovirus
  CDS (1)..(546)
  misc_feature (1)..(546): n is c, g, a, t/u
  misc_feature (1)..(546): Human_Rhinovirus_20_Strain_ATCC_VR1130_3C(K88P)
gggccacaagaagaatttggacgtagtttaatcaaacataacacttgtgttgtaacaacagacaatggtaagttcactggattagggatctatgacaatataatgattataccaacacatgctgatgctgggaaagaagtagaaatagatgggatcaaaactcaggttgatgatgcttatgatttacataattcccagggaatcaaattggaaattacagtccttaaattgcatagaaatgaaaagtttagagacattagaccntacataccagagactgaagatgattatccagaatgccatttagcactggttgctaatcaacaggagcctactatactagaagttggcgactgctgctcatatggaaacatattattaagtggcaaccagacagctagaatgattaaatacaactacccaacaaaatcaggattctgtggaggggtcttgtataaaataggattagtgctaggtatacatgttgggggaaatggtagggatggtttttccgcgatgctactaagatcatatttcactgaacaacag

SEQ ID NO: 596 - protein, 182 aa, Human rhinovirus
GPQEEFGRSLIKHNTCVVTTDNGKFTGLGIYDNIMIIPTHADAGKEVEIDGIKTQVDDAYDLHNSQGIKLEITVLKLHRNEKFRDIRPYIPETEDDYPECHLALVANQQEPTILEVGDCCSYGNILLSGNQTARMIKYNYPTKSGFCGGVLYKIGLVLGIHVGGNGRDGFSAMLLRSYFTEQ

SEQ ID NO: 597 - DNA, 549 bp, Human rhinovirus
  CDS (1)..(549)
  misc_feature (1)..(549): n is c, g, a, t/u
  misc_feature (1)..(549): Human_Rhinovirus_20_Strain_ATCC_VR1130_3C(R87P)
gggccacaagaagaatttggacgtagtttaatcaaacataacacttgtgttgtaacaacagacaatggtaagttcactggattagggatctatgacaatataatgattataccaacacatgctgatgctgggaaagaagtagaaatagatgggatcaaaactcaggttgatgatgcttatgatttacataattcccagggaatcaaattggaaattacagtccttaaattgcatagaaatgaaaagtttagagacattccnaaatacataccagagactgaagatgattatccagaatgccatttagcactggttgctaatcaacaggagcctactatactagaagttggcgactgctgctcatatggaaacatattattaagtggcaaccagacagctagaatgattaaatacaactacccaacaaaatcaggattctgtggaggggtcttgtataaaataggattagtgctaggtatacatgttgggggaaatggtagggatggtttttccgcgatgctactaagatcatatttcactgaacaacag

SEQ ID NO: 598 - protein, 183 aa, Human rhinovirus
GPQEEFGRSLIKHNTCVVTTDNGKFTGLGIYDNIMIIPTHADAGKEVEIDGIKTQVDDAYDLHNSQGIKLEITVLKLHRNEKFRDIPKYIPETEDDYPECHLALVANQQEPTILEVGDCCSYGNILLSGNQTARMIKYNYPTKSGFCGGVLYKIGLVLGIHVGGNGRDGFSAMLLRSYFTEQQ

SEQ ID NO: 599 - DNA, 549 bp, Human rhinovirus
  CDS (1)..(549)
  misc_feature (1)..(549): n is c, g, a, t/u
  misc_feature (1)..(549): Human_Rhinovirus_20_Strain_ATCC_VR1130_3C(T19P)
gggccacaagaagaatttggacgtagtttaatcaaacataacacttgtgttgtaccnacagacaatggtaagttcactggattagggatctatgacaatataatgattataccaacacatgctgatgctgggaaagaagtagaaatagatgggatcaaaactcaggttgatgatgcttatgatttacataattcccagggaatcaaattggaaattacagtccttaaattgcatagaaatgaaaagtttagagacattagaaaatacataccagagactgaagatgattatccagaatgccatttagcactggttgctaatcaacaggagcctactatactagaagttggcgactgctgctcatatggaaacatattattaagtggcaaccagacagctagaatgattaaatacaactacccaacaaaatcaggattctgtggaggggtcttgtataaaataggattagtgctaggtatacatgttgggggaaatggtagggatggtttttccgcgatgctactaagatcatatttcactgaacaacag

SEQ ID NO: 600 - protein, 183 aa, Human rhinovirus
GPQEEFGRSLIKHNTCVVPTDNGKFTGLGIYDNIMIIPTHADAGKEVEIDGIKTQVDDAYDLHNSQGIKLEITVLKLHRNEKFRDIRKYIPETEDDYPECHLALVANQQEPTILEVGDCCSYGNILLSGNQTARMIKYNYPTKSGFCGGVLYKIGLVLGIHVGGNGRDGFSAMLLRSYFTEQQ

SEQ ID NO: 601 - DNA, 549 bp, Human rhinovirus
  CDS (1)..(549)
  misc_feature (1)..(549): n is c, g, a, t/u
  misc_feature (1)..(549): Human_Rhinovirus_20_Strain_ATCC_VR1130_3C(T20P)
gggccacaagaagaatttggacgtagtttaatcaaacataacacttgtgttgtaacaccngacaatggtaagttcactggattagggatctatgacaatataatgattataccaacacatgctgatgctgggaaagaagtagaaatagatgggatcaaaactcaggttgatgatgcttatgatttacataattcccagggaatcaaattggaaattacagtccttaaattgcatagaaatgaaaagtttagagacattagaaaatacataccagagactgaagatgattatccagaatgccatttagcactggttgctaatcaacaggagcctactatactagaagttggcgactgctgctcatatggaaacatattattaagtggcaaccagacagctagaatgattaaatacaactacccaacaaaatcaggattctgtggaggggtcttgtataaaataggattagtgctaggtatacatgttgggggaaatggtagggatggtttttccgcgatgctactaagatcatatttcactgaacaacag

SEQ ID NO: 602 - protein, 183 aa, Human rhinovirus
GPQEEFGRSLIKHNTCVVTPDNGKFTGLGIYDNIMIIPTHADAGKEVEIDGIKTQVDDAYDLHNSQGIKLEITVLKLHRNEKFRDIRKYIPETEDDYPECHLALVANQQEPTILEVGDCCSYGNILLSGNQTARMIKYNYPTKSGFCGGVLYKIGLVLGIHVGGNGRDGFSAMLLRSYFTEQQ

SEQ ID NO: 603 - DNA, 549 bp, Human rhinovirus
  CDS (1)..(549)
  misc_feature (1)..(549): Human_Rhinovirus_20_Strain_ATCC_VR1130_3C(wt)
gggccacaagaagaatttggacgtagtttaatcaaacataacacttgtgttgtaacaacagacaatggtaagttcactggattagggatctatgacaatataatgattataccaacacatgctgatgctgggaaagaagtagaaatagatgggatcaaaactcaggttgatgatgcttatgatttacataattcccagggaatcaaattggaaattacagtccttaaattgcatagaaatgaaaagtttagagacattagaaaatacataccagagactgaagatgattatccagaatgccatttagcactggttgctaatcaacaggagcctactatactagaagttggcgactgctgctcatatggaaacatattattaagtggcaaccagacagctagaatgattaaatacaactacccaacaaaatcaggattctgtggaggggtcttgtataaaataggattagtgctaggtatacatgttgggggaaatggtagggatggtttttccgcgatgctactaagatcatatttcactgaacaacag

SEQ ID NO: 604 - protein, 183 aa, Human rhinovirus
GPQEEFGRSLIKHNTCVVTTDNGKFTGLGIYDNIMIIPTHADAGKEVEIDGIKTQVDDAYDLHNSQGIKLEITVLKLHRNEKFRDIRKYIPETEDDYPECHLALVANQQEPTILEVGDCCSYGNILLSGNQTARMIKYNYPTKSGFCGGVLYKIGLVLGIHVGGNGRDGFSAMLLRSYFTEQQ

SEQ ID NO: 605 - DNA, 549 bp, Human rhinovirus
  CDS (1)..(549)
  misc_feature (1)..(549): n is c, g, a, t/u
  misc_feature (1)..(549): Human_Rhinovirus_89_Strain_ATCC_VR1199_3C(I114P)
ggcccagaggaagagtttggtcgctcactactcaaacataattgctgtgttgtgacaaccgacaaaggcaaattcacaggtcttggcatatatgaccaagtcatggtacttccaacacattctgacccaggctctgagatcttggtagatggagtaaaagttaaggtctctgattcctatgatttgcataaccatgagggtgttaagctagagatcacagttgtgaaattaattagaaatgagaagtttaaagacatcagaaaatatttaccctcacgtgaagatgactatcctgcttgtaaccttgccttactagctaatcaagatgagccaacaataccnagtgttggtgatgcagtatcttatggtaacatcttattgagtggtaccaatactgcacgaatgatcaagtaccactacccgacaaaagctggatattgtgggggtgttttgtacaaggttggctctattcttggtatacatgttggtggcaatggtagagatggattttctgcaatgcttctcaaatcttattttggtgaaacccag

SEQ ID NO: 606 - protein, 183 aa, Human rhinovirus
GPEEEFGRSLLKHNCCVVTTDKGKFTGLGIYDQVMVLPTHSDPGSEILVDGVKVKVSDSYDLHNHEGVKLEITVVKLIRNEKFKDIRKYLPSREDDYPACNLALLANQDEPTIPSVGDAVSYGNILLSGTNTARMIKYHYPTKAGYCGGVLYKVGSILGIHVGGNGRDGFSAMLLKSYFGETQ

SEQ ID NO: 607 - DNA, 549 bp, Human rhinovirus
  CDS (1)..(549)
  misc_feature (1)..(549): n is c, g, a, t/u
  misc_feature (1)..(549): Human_Rhinovirus_89_Strain_ATCC_VR1199_3C(K88P)
ggcccagaggaagagtttggtcgctcactactcaaacataattgctgtgttgtgacaaccgacaaaggcaaattcacaggtcttggcatatatgaccaagtcatggtacttccaacacattctgacccaggctctgagatcttggtagatggagtaaaagttaaggtctctgattcctatgatttgcataaccatgagggtgttaagctagagatcacagttgtgaaattaattagaaatgagaagtttaaagacatcagaccntatttaccctcacgtgaagatgactatcctgcttgtaaccttgccttactagctaatcaagatgagccaacaataataagtgttggtgatgcagtatcttatggtaacatcttattgagtggtaccaatactgcacgaatgatcaagtaccactacccgacaaaagctggatattgtgggggtgttttgtacaaggttggctctattcttggtatacatgttggtggcaatggtagagatggattttctgcaatgcttctcaaatcttattttggtgaaacccag

SEQ ID NO: 608 - protein, 183 aa, Human rhinovirus
GPEEEFGRSLLKHNCCVVTTDKGKFTGLGIYDQVMVLPTHSDPGSEILVDGVKVKVSDSYDLHNHEGVKLEITVVKLIRNEKFKDIRPYLPSREDDYPACNLALLANQDEPTIISVGDAVSYGNILLSGTNTARMIKYHYPTKAGYCGGVLYKVGSILGIHVGGNGRDGFSAMLLKSYFGETQ

SEQ ID NO: 609 - DNA, 549 bp, Human rhinovirus
  CDS (1)..(549)
  misc_feature (1)..(549): n is c, g, a, t/u
  misc_feature (1)..(549): Human_Rhinovirus_89_Strain_ATCC_VR1199_3C(R87P)
ggcccagaggaagagtttggtcgctcactactcaaacataattgctgtgttgtgacaaccgacaaaggcaaattcacaggtcttggcatatatgaccaagtcatggtacttccaacacattctgacccaggctctgagatcttggtagatggagtaaaagttaaggtctctgattcctatgatttgcataaccatgagggtgttaagctagagatcacagttgtgaaattaattagaaatgagaagtttaaagacatcccnaaatatttaccctcacgtgaagatgactatcctgcttgtaaccttgccttactagctaatcaagatgagccaacaataataagtgttggtgatgcagtatcttatggtaacatcttattgagtggtaccaatactgcacgaatgatcaagtaccactacccgacaaaagctggatattgtgggggtgttttgtacaaggttggctctattcttggtatacatgttggtggcaatggtagagatggattttctgcaatgcttctcaaatcttattttggtgaaacccag

SEQ ID NO: 610 - protein, 183 aa, Human rhinovirus
GPEEEFGRSLLKHNCCVVTTDKGKFTGLGIYDQVMVLPTHSDPGSEILVDGVKVKVSDSYDLHNHEGVKLEITVVKLIRNEKFKDIPKYLPSREDDYPACNLALLANQDEPTIISVGDAVSYGNILLSGTNTARMIKYHYPTKAGYCGGVLYKVGSILGIHVGGNGRDGFSAMLLKSYFGETQ

SEQ ID NO: 611 - DNA, 549 bp, Human rhinovirus
  CDS (1)..(549)
  misc_feature (1)..(549): n is c, g, a, t/u
  misc_feature (1)..(549): Human_Rhinovirus_89_Strain_ATCC_VR1199_3C(T112P)
ggcccagaggaagagtttggtcgctcactactcaaacataattgctgtgttgtgacaaccgacaaaggcaaattcacaggtcttggcatatatgaccaagtcatggtacttccaacacattctgacccaggctctgagatcttggtagatggagtaaaagttaaggtctctgattcctatgatttgcataaccatgagggtgttaagctagagatcacagttgtgaaattaattagaaatgagaagtttaaagacatcagaaaatatttaccctcacgtgaagatgactatcctgcttgtaaccttgccttactagctaatcaagatgagccaccnataataagtgttggtgatgcagtatcttatggtaacatcttattgagtggtaccaatactgcacgaatgatcaagtaccactacccgacaaaagctggatattgtgggggtgttttgtacaaggttggctctattcttggtatacatgttggtggcaatggtagagatggattttctgcaatgcttctcaaatcttattttggtgaaacccag

SEQ ID NO: 612 - protein, 183 aa, Human rhinovirus
GPEEEFGRSLLKHNCCVVTTDKGKFTGLGIYDQVMVLPTHSDPGSEILVDGVKVKVSDSYDLHNHEGVKLEITVVKLIRNEKFKDIRKYLPSREDDYPACNLALLANQDEPPIISVGDAVSYGNILLSGTNTARMIKYHYPTKAGYCGGVLYKVGSILGIHVGGNGRDGFSAMLLKSYFGETQ

SEQ ID NO: 613 - DNA, 549 bp, Human rhinovirus
  CDS (1)..(549)
  misc_feature (1)..(549): n is c, g, a, t/u
  misc_feature (1)..(549): Human_Rhinovirus_89_Strain_ATCC_VR1199_3C(T19P)
ggcccagaggaagagtttggtcgctcactactcaaacataattgctgtgttgtgccnaccgacaaaggcaaattcacaggtcttggcatatatgaccaagtcatggtacttccaacacattctgacccaggctctgagatcttggtagatggagtaaaagttaaggtctctgattcctatgatttgcataaccatgagggtgttaagctagagatcacagttgtgaaattaattagaaatgagaagtttaaagacatcagaaaatatttaccctcacgtgaagatgactatcctgcttgtaaccttgccttactagctaatcaagatgagccaacaataataagtgttggtgatgcagtatcttatggtaacatcttattgagtggtaccaatactgcacgaatgatcaagtaccactacccgacaaaagctggatattgtgggggtgttttgtacaaggttggctctattcttggtatacatgttggtggcaatggtagagatggattttctgcaatgcttctcaaatcttattttggtgaaacccag

SEQ ID NO: 614 - protein, 183 aa, Human rhinovirus
GPEEEFGRSLLKHNCCVVPTDKGKFTGLGIYDQVMVLPTHSDPGSEILVDGVKVKVSDSYDLHNHEGVKLEITVVKLIRNEKFKDIRKYLPSREDDYPACNLALLANQDEPTIISVGDAVSYGNILLSGTNTARMIKYHYPTKAGYCGGVLYKVGSILGIHVGGNGRDGFSAMLLKSYFGETQ

SEQ ID NO: 615 - DNA, 549 bp, Human rhinovirus
  CDS (1)..(549)
  misc_feature (1)..(549): n is c, g, a, t/u
  misc_feature (1)..(549): Human_Rhinovirus_89_Strain_ATCC_VR1199_3C(T20P)
ggcccagaggaagagtttggtcgctcactactcaaacataattgctgtgttgtgacaccngacaaaggcaaattcacaggtcttggcatatatgaccaagtcatggtacttccaacacattctgacccaggctctgagatcttggtagatggagtaaaagttaaggtctctgattcctatgatttgcataaccatgagggtgttaagctagagatcacagttgtgaaattaattagaaatgagaagtttaaagacatcagaaaatatttaccctcacgtgaagatgactatcctgcttgtaaccttgccttactagctaatcaagatgagccaacaataataagtgttggtgatgcagtatcttatggtaacatcttattgagtggtaccaatactgcacgaatgatcaagtaccactacccgacaaaagctggatattgtgggggtgttttgtacaaggttggctctattcttggtatacatgttggtggcaatggtagagatggattttctgcaatgcttctcaaatcttattttggtgaaacccag

SEQ ID NO: 616 - protein, 183 aa, Human rhinovirus
GPEEEFGRSLLKHNCCVVTPDKGKFTGLGIYDQVMVLPTHSDPGSEILVDGVKVKVSDSYDLHNHEGVKLEITVVKLIRNEKFKDIRKYLPSREDDYPACNLALLANQDEPTIISVGDAVSYGNILLSGTNTARMIKYHYPTKAGYCGGVLYKVGSILGIHVGGNGRDGFSAMLLKSYFGETQ

SEQ ID NO: 617 - DNA, 549 bp, Human rhinovirus
  CDS (1)..(549)
  misc_feature (1)..(549): Human_Rhinovirus_89_Strain_ATCC_VR1199_3C(wt))
ggcccagaggaagagtttggtcgctcactactcaaacataattgctgtgttgtgacaaccgacaaaggcaaattcacaggtcttggcatatatgaccaagtcatggtacttccaacacattctgacccaggctctgagatcttggtagatggagtaaaagttaaggtctctgattcctatgatttgcataaccatgagggtgttaagctagagatcacagttgtgaaattaattagaaatgagaagtttaaagacatcagaaaatatttaccctcacgtgaagatgactatcctgcttgtaaccttgccttactagctaatcaagatgagccaacaataataagtgttggtgatgcagtatcttatggtaacatcttattgagtggtaccaatactgcacgaatgatcaagtaccactacccgacaaaagctggatattgtgggggtgttttgtacaaggttggctctattcttggtatacatgttggtggcaatggtagagatggattttctgcaatgcttctcaaatcttattttggtgaaacccag

SEQ ID NO: 618 - protein, 183 aa, Human rhinovirus
GPEEEFGRSLLKHNCCVVTTDKGKFTGLGIYDQVMVLPTHSDPGSEILVDGVKVKVSDSYDLHNHEGVKLEITVVKLIRNEKFKDIRKYLPSREDDYPACNLALLANQDEPTIISVGDAVSYGNILLSGTNTARMIKYHYPTKAGYCGGVLYKVGSILGIHVGGNGRDGFSAMLLKSYFGETQ

SEQ ID NO: 619 - DNA, 549 bp, Human rhinovirus
  CDS (1)..(549)
  misc_feature (1)..(549): Human_Rhinovirus_A2_3C_X02316
ggaccagaggaggaatttgggatgtctttaattaaacataactcatgtgttattacaacagaaaatgggaaattcacaggtcttggagtatacgacagatttgtggtcgtaccaacacatgcagatcctggaaaggaaattcaggttgatggtataactacaaaagtcattgactcatatgacctatacaacaagaatgggataaagctagaaataacagtacttaaattagatagaaatgaaaaatttagagatatcaggagatatatacctaacaatgaagatgattaccccaattgcaacttagcactgctagcaaaccagcctgaaccaactataatcaatgttggagatgttgtatcctatggcaatatactgctcagtggcaaccaaacggctagaatgcttaaatacagttacccaactaaatctggttactgtggaggtgtcttatacaaaattgggcaagtgcttggaatacatgttgggggcaatggtagggatggtttctcagctatgttactcagatcctatttcactgatgttcag

SEQ ID NO: 620 - protein, 183 aa, Human rhinovirus
GPEEEFGMSLIKHNSCVITTENGKFTGLGVYDRFVVVPTHADPGKEIQVDGITTKVIDSYDLYNKNGIKLEITVLKLDRNEKFRDIRRYIPNNEDDYPNCNLALLANQPEPTIINVGDVVSYGNILLSGNQTARMLKYSYPTKSGYCGGVLYKIGQVLGIHVGGNGRDGFSAMLLRSYFTDVQ

SEQ ID NO: 621 - DNA, 549 bp, Human rhinovirus
  CDS (1)..(549)
  misc_feature (1)..(549): n is c, g, a, t/u
  misc_feature (1)..(549): Human_Rhinovirus_A2_3C_X02316_3C(I114P)
ggaccagaggaggaatttgggatgtctttaattaaacataactcatgtgttattacaacagaaaatgggaaattcacaggtcttggagtatacgacagatttgtggtcgtaccaacacatgcagatcctggaaaggaaattcaggttgatggtataactacaaaagtcattgactcatatgacctatacaacaagaatgggataaagctagaaataacagtacttaaattagatagaaatgaaaaatttagagatatcaggagatatatacctaacaatgaagatgattaccccaattgcaacttagcactgctagcaaaccagcctgaaccaactataccnaatgttggagatgttgtatcctatggcaatatactgctcagtggcaaccaaacggctagaatgcttaaatacagttacccaactaaatctggttactgtggaggtgtcttatacaaaattgggcaagtgcttggaatacatgttgggggcaatggtagggatggtttctcagctatgttactcagatcctatttcactgatgttcag

SEQ ID NO: 622 - protein, 183 aa, Human rhinovirus
GPEEEFGMSLIKHNSCVITTENGKFTGLGVYDRFVVVPTHADPGKEIQVDGITTKVIDSYDLYNKNGIKLEITVLKLDRNEKFRDIRRYIPNNEDDYPNCNLALLANQPEPTIPNVGDVVSYGNILLSGNQTARMLKYSYPTKSGYCGGVLYKIGQVLGIHVGGNGRDGFSAMLLRSYFTDVQ

SEQ ID NO: 623 - DNA, 549 bp, Human rhinovirus
  CDS (1)..(549)
  misc_feature (1)..(549): n is c, g, a, t/u
  misc_feature (1)..(549): Human_Rhinovirus_A2_3C_X02316_3C(Q108P)
ggaccagaggaggaatttgggatgtctttaattaaacataactcatgtgttattacaacagaaaatgggaaattcacaggtcttggagtatacgacagatttgtggtcgtaccaacacatgcagatcctggaaaggaaattcaggttgatggtataactacaaaagtcattgactcatatgacctatacaacaagaatgggataaagctagaaataacagtacttaaattagatagaaatgaaaaatttagagatatcaggagatatatacctaacaatgaagatgattaccccaattgcaacttagcactgctagcaaacccncctgaaccaactataatcaatgttggagatgttgtatcctatggcaatatactgctcagtggcaaccaaacggctagaatgcttaaatacagttacccaactaaatctggttactgtggaggtgtcttatacaaaattgggcaagtgcttggaatacatgttgggggcaatggtagggatggtttctcagctatgttactcagatcctatttcactgatgttcag

SEQ ID NO: 624 - protein, 183 aa, Human rhinovirus
GPEEEFGMSLIKHNSCVITTENGKFTGLGVYDRFVVVPTHADPGKEIQVDGITTKVIDSYDLYNKNGIKLEITVLKLDRNEKFRDIRRYIPNNEDDYPNCNLALLANPPEPTIINVGDVVSYGNILLSGNQTARMLKYSYPTKSGYCGGVLYKIGQVLGIHVGGNGRDGFSAMLLRSYFTDVQ

SEQ ID NO: 625 - DNA, 549 bp, Human rhinovirus
  CDS (1)..(549)
  misc_feature (1)..(549): n is c, g, a, t/u
  misc_feature (1)..(549): Human_Rhinovirus_A2_3C_X02316_3C(R87P)
ggaccagaggaggaatttgggatgtctttaattaaacataactcatgtgttattacaacagaaaatgggaaattcacaggtcttggagtatacgacagatttgtggtcgtaccaacacatgcagatcctggaaaggaaattcaggttgatggtataactacaaaagtcattgactcatatgacctatacaacaagaatgggataaagctagaaataacagtacttaaattagatagaaatgaaaaatttagagatatcccnagatatatacctaacaatgaagatgattaccccaattgcaacttagcactgctagcaaaccagcctgaaccaactataatcaatgttggagatgttgtatcctatggcaatatactgctcagtggcaaccaaacggctagaatgcttaaatacagttacccaactaaatctggttactgtggaggtgtcttatacaaaattgggcaagtgcttggaatacatgttgggggcaatggtagggatggtttctcagctatgttactcagatcctatttcactgatgttcag

SEQ ID NO: 626 - protein, 183 aa, Human rhinovirus
GPEEEFGMSLIKHNSCVITTENGKFTGLGVYDRFVVVPTHADPGKEIQVDGITTKVIDSYDLYNKNGIKLEITVLKLDRNEKFRDIPRYIPNNEDDYPNCNLALLANQPEPTIINVGDVVSYGNILLSGNQTARMLKYSYPTKSGYCGGVLYKIGQVLGIHVGGNGRDGFSAMLLRSYFTDVQ

SEQ ID NO: 627 - DNA, 549 bp, Human rhinovirus
  CDS (1)..(549)
  misc_feature (1)..(549): n is c, g, a, t/u
  misc_feature (1)..(549): Human_Rhinovirus_A2_3C_X02316_3C(R88P)
ggaccagaggaggaatttgggatgtctttaattaaacataactcatgtgttattacaacagaaaatgggaaattcacaggtcttggagtatacgacagatttgtggtcgtaccaacacatgcagatcctggaaaggaaattcaggttgatggtataactacaaaagtcattgactcatatgacctatacaacaagaatgggataaagctagaaataacagtacttaaattagatagaaatgaaaaatttagagatatcaggccntatatacctaacaatgaagatgattaccccaattgcaacttagcactgctagcaaaccagcctgaaccaactataatcaatgttggagatgttgtatcctatggcaatatactgctcagtggcaaccaaacggctagaatgcttaaatacagttacccaactaaatctggttactgtggaggtgtcttatacaaaattgggcaagtgcttggaatacatgttgggggcaatggtagggatggtttctcagctatgttactcagatcctatttcactgatgttcag

SEQ ID NO: 628 - protein, 183 aa, Human rhinovirus
GPEEEFGMSLIKHNSCVITTENGKFTGLGVYDRFVVVPTHADPGKEIQVDGITTKVIDSYDLYNKNGIKLEITVLKLDRNEKFRDIRPYIPNNEDDYPNCNLALLANQPEPTIINVGDVVSYGNILLSGNQTARMLKYSYPTKSGYCGGVLYKIGQVLGIHVGGNGRDGFSAMLLRSYFTDVQ

SEQ ID NO: 629 - DNA, 549 bp, Human rhinovirus
  CDS (1)..(549)
  misc_feature (1)..(549): n is c, g, a, t/u
  misc_feature (1)..(549): Human_Rhinovirus_A2_3C_X02316_3C(T112P)
ggaccagaggaggaatttgggatgtctttaattaaacataactcatgtgttattacaacagaaaatgggaaattcacaggtcttggagtatacgacagatttgtggtcgtaccaacacatgcagatcctggaaaggaaattcaggttgatggtataactacaaaagtcattgactcatatgacctatacaacaagaatgggataaagctagaaataacagtacttaaattagatagaaatgaaaaatttagagatatcaggagatatatacctaacaatgaagatgattaccccaattgcaacttagcactgctagcaaaccagcctgaaccaccnataatcaatgttggagatgttgtatcctatggcaatatactgctcagtggcaaccaaacggctagaatgcttaaatacagttacccaactaaatctggttactgtggaggtgtcttatacaaaattgggcaagtgcttggaatacatgttgggggcaatggtagggatggtttctcagctatgttactcagatcctatttcactgatgttcag

SEQ ID NO: 630 - protein, 183 aa, Human rhinovirus
GPEEEFGMSLIKHNSCVITTENGKFTGLGVYDRFVVVPTHADPGKEIQVDGITTKVIDSYDLYNKNGIKLEITVLKLDRNEKFRDIRRYIPNNEDDYPNCNLALLANQPEPPIINVGDVVSYGNILLSGNQTARMLKYSYPTKSGYCGGVLYKIGQVLGIHVGGNGRDGFSAMLLRSYFTDVQ

SEQ ID NO: 631 - DNA, 549 bp, Human rhinovirus
  CDS (1)..(549)
  misc_feature (1)..(549): Human_Rhinovirus_A2_3C_X02316_3C(T19P)
  misc_feature (1)..(549): n is c, g, a, t/u
ggaccagaggaggaatttgggatgtctttaattaaacataactcatgtgttattccnacagaaaatgggaaattcacaggtcttggagtatacgacagatttgtggtcgtaccaacacatgcagatcctggaaaggaaattcaggttgatggtataactacaaaagtcattgactcatatgacctatacaacaagaatgggataaagctagaaataacagtacttaaattagatagaaatgaaaaatttagagatatcaggagatatatacctaacaatgaagatgattaccccaattgcaacttagcactgctagcaaaccagcctgaaccaactataatcaatgttggagatgttgtatcctatggcaatatactgctcagtggcaaccaaacggctagaatgcttaaatacagttacccaactaaatctggttactgtggaggtgtcttatacaaaattgggcaagtgcttggaatacatgttgggggcaatggtagggatggtttctcagctatgttactcagatcctatttcactgatgttcag

SEQ ID NO: 632 - protein, 183 aa, Human rhinovirus
GPEEEFGMSLIKHNSCVIPTENGKFTGLGVYDRFVVVPTHADPGKEIQVDGITTKVIDSYDLYNKNGIKLEITVLKLDRNEKFRDIRRYIPNNEDDYPNCNLALLANQPEPTIINVGDVVSYGNILLSGNQTARMLKYSYPTKSGYCGGVLYKIGQVLGIHVGGNGRDGFSAMLLRSYFTDVQ

SEQ ID NO: 633 - DNA, 549 bp, Human rhinovirus
  CDS (1)..(549)
  misc_feature (1)..(549): n is c, g, a, t/u
  misc_feature (1)..(549): Human_Rhinovirus_A2_3C_X02316_3C(T20P)
ggaccagaggaggaatttgggatgtctttaattaaacataactcatgtgttattacaccngaaaatgggaaattcacaggtcttggagtatacgacagatttgtggtcgtaccaacacatgcagatcctggaaaggaaattcaggttgatggtataactacaaaagtcattgactcatatgacctatacaacaagaatgggataaagctagaaataacagtacttaaattagatagaaatgaaaaatttagagatatcaggagatatatacctaacaatgaagatgattaccccaattgcaacttagcactgctagcaaaccagcctgaaccaactataatcaatgttggagatgttgtatcctatggcaatatactgctcagtggcaaccaaacggctagaatgcttaaatacagttacccaactaaatctggttactgtggaggtgtcttatacaaaattgggcaagtgcttggaatacatgttgggggcaatggtagggatggtttctcagctatgttactcagatcctatttcactgatgttcag

SEQ ID NO: 634 - protein, 183 aa, Human rhinovirus
GPEEEFGMSLIKHNSCVITPENGKFTGLGVYDRFVVVPTHADPGKEIQVDGITTKVIDSYDLYNKNGIKLEITVLKLDRNEKFRDIRRYIPNNEDDYPNCNLALLANQPEPTIINVGDVVSYGNILLSGNQTARMLKYSYPTKSGYCGGVLYKIGQVLGIHVGGNGRDGFSAMLLRSYFTDVQ

SEQ ID NO: 635 - DNA, 615 bp, Porcine Teschovirus
  CDS (1)..(615)
  misc_feature (1)..(615): Porcine_Teschovirus_3C(wt)_NC003985
gggccaaaaggacaagccaatatggaaatggaaagaactttaatgaagaagaacatagtggaaatgacatatgagaagcacaacgggaggtttcaaactaccacagtcctgtttgtgcgtgatcggatttttctgatcaacactcacattttgtcatcaattaagaacttccactatgagaacactgagattccagcagcttcagttcagaaagttcaggccatatttgatggacatccatctgatgtaactgcagtccagttcactgttggacgacaataccgtgacatcacaagcaattttataatcagtctgccaaatcctggcacaccaatagttggcttgatgaagacagaaggtagcagttatatctggtctggtgaatgtctcccatttaaaaatacaatgaacacttatgaaggctgtgttcctcatgtgttaccatataaggccgtgacagcccatggctactgtggctctgtcatggtcgcagatgctggagtctggaaaggcatttgtggcatacactccttaggagatggtgccataggtgcagcaacagttttgtcaagacagcatttgctcaaccttcttgagggattcctggaattccag

SEQ ID NO: 636 - protein, 205 aa, Porcine Teschovirus
GPKGQANMEMERTLMKKNIVEMTYEKHNGRFQTTTVLFVRDRIFLINTHILSSIKNFHYENTEIPAASVQKVQAIFDGHPSDVTAVQFTVGRQYRDITSNFIISLPNPGTPIVGLMKTEGSSYIWSGECLPFKNTMNTYEGCVPHVLPYKAVTAHGYCGSVMVADAGVWKGICGIHSLGDGAIGAATVLSRQHLLNLLEGFLEFQ

SEQ ID NO: 637 - DNA, 525 bp, Seneca Valley Virus
  CDS (1)..(525)
  misc_feature (1)..(525): Seneca_Valley_Virus_3C(wt)
gacatgggctttgaggctgcggtcgctaagaaagtggtcgtccccattaccttcatggttcccaacagaccttctgggcttacacagtccgctcttctggtgaccggccggaccttcctaatcaatgaacatacatggtccaatccctcctggaccagcttcacaatccgcggtgaggtacacactcgtgatgagcccttccaaacggttcatttcactcaccacggtattcccacagatctgatgatggtacgtctcggaccgggcaattctttccctaacaatctagacaagtttggacttgaccagatgccggcacgcaactcccgtgtggttggcgtttcgtccagttacggaaacttcttcttctctggaaatttcctcggatttgttgattccatcacctctgaacaaggaacttacgcaagactctttaggtacagggtgacgacctacaaaggatggtgcggctcggccctggtctgtgaggccggtggcgtccgacgcatcattggcctgcattct

SEQ ID NO: 638 - protein, 175 aa, Seneca Valley Virus
DMGFEAAVAKKVVVPITFMVPNRPSGLTQSALLVTGRTFLINEHTWSNPSWTSFTIRGEVHTRDEPFQTVHFTHHGIPTDLMMVRLGPGNSFPNNLDKFGLDQMPARNSRVVGVSSSYGNFFFSGNFLGFVDSITSEQGTYARLFRYRVTTYKGWCGSALVCEAGGVRRIIGLHS

SEQ ID NO: 639 - DNA, 549 bp, Swine Vesicular Disease
  CDS (1)..(549)
  misc_feature (1)..(549): Swine_Vesicular_Disease_Virus_3C(wt)
ggtccagcgtttgagttcgccgtggcgatgatgaaaagaaacgccagtacagtgaaaactgagtacggtgaattcaccatgcttgggatttacgacaggtgggcggtgttgccacgccatgccaaacctggccccaccatcttgatgaacgaccaggtagtcggagtgttggacgccaaggaactagttgataaagatgggaccaacctggaattgactctcttgaagctcaaccgcaacgagaagtttagagacatcaggggattcttagcacgagaggaggtcgaagtgaacgaagctgtcctagcaataaacacaagtaaattcccgaatatgtacatacccgtgggccgggtaaccgactatgggttcttaaatctgggtggaacccccacgaagagaatgctcatgtacaatttcccaactagggcaggccagtgtgggggtgtccttatgtcaacagggaaagtcctgggaatacatgtaggagggaatggacaccaagggttttcagcggcactcctcagacactacttcaacgaggagcag

SEQ ID NO: 640 - protein, 183 aa, Swine Vesicular Disease
GPAFEFAVAMMKRNASTVKTEYGEFTMLGIYDRWAVLPRHAKPGPTILMNDQVVGVLDAKELVDKDGTNLELTLLKLNRNEKFRDIRGFLAREEVEVNEAVLAINTSKFPNMYIPVGRVTDYGFLNLGGTPTKRMLMYNFPTRAGQCGGVLMSTGKVLGIHVGGNGHQGFSAALLRHYFNEEQ

SEQ ID NO: 641 - DNA, 23 bp, Artificial Sequence
  Nde-3C-F2  Primer
catatgagtggtgccccaccgac

SEQ ID NO: 642 - DNA, 20 bp, Artificial Sequence
  CCGATTCTAGACTCGAGTTA
ccgattctagactcgagtta

SEQ ID NO: 643 - DNA, 20 bp, Artificial Sequence
  T7 Primer
taatacgactcactataggg

SEQ ID NO: 644 - DNA, 20 bp, Artificial Sequence
  pSNAP-SR Primer
cggatatagttcctcctttc

SEQ ID NO: 645 - DNA, 90 bp, Artificial Sequence
  Delta 1D2A interrupter sequence
  misc_feature (1)..(90): Nucleotides 34-87 code for the 2A sequence
  CDS (1)..(90)
cayaagcaaaagatcattgcaccagcaaagcagcttctgaattttgacctgctcaagttggccggagacgttgagtccaaccctggaccc

SEQ ID NO: 646 - protein, 30 aa, Artificial Sequence
  Synthetic Construct
HKQKIIAPAKQLLNFDLLKLAGDVESNPGP

SEQ ID NO: 647 - protein, 8 aa, Artificial Sequence
  Conserved 2A motif
  MISC_FEATURE (2)..(2): XAA is any naturally occurring amino acid
  MISC_FEATURE (4)..(4): XAA is any naturally occurring amino acid
DXEXNPGP

SEQ ID NO: 648 - DNA, 558 bp, Gaussia princeps
  CDS (1)..(558)
  misc_feature (1)..(558): GLuc
atgggagtcaaagttctgtttgccctgatctgcatcgctgtggccgaggccaagcccaccgagaacaacgaagacttcaacatcgtggccgtggccagcaacttcgcgaccacggatctcgatgctgaccgcgggaagttgcccggcaagaagctgccgctggaggtgctcaaagagatggaagccaatgcccggaaagctggctgcaccaggggctgtctgatctgcctgtcccacatcaagtgcacgcccaagatgaagaagttcatcccaggacgctgccacacctacgaaggcgacaaagagtccgcacagggcggcataggcgaggcgatcgtcgacattcctgagattcctgggttcaaggacttggagcccatggagcagttcatcgcacaggtcgatctgtgtgtggactgcacaactggctgcctcaaagggcttgccaacgtgcagtgttctgacctgctcaagaagtggctgccgcaacgctgtgcgacctttgccagcaagatccagggccaggtggacaagatcaagggggccggtggtgactaa

SEQ ID NO: 649 - protein, 185 aa, Gaussia princeps
MGVKVLFALICIAVAEAKPTENNEDFNIVAVASNFATTDLDADRGKLPGKKLPLEVLKEMEANARKAGCTRGCLICLSHIKCTPKMKKFIPGRCHTYEGDKESAQGGIGEAIVDIPEIPGFKDLEPMEQFIAQVDLCVDCTTGCLKGLANVQCSDLLKKWLPQRCATFASKIQGQVDKIKGAGGD

SEQ ID NO: 650 - DNA, 558 bp, Gaussia princeps
  misc_feature (1)..(558): SGLuc
  CDS (1)..(558)
atgggagtcaaagttctgtttgccctgatctgcatcgctgtggccgaggccaagcccaccgagaacaacgaagacttcaacatcgtggccgtggccagcaactttgcgaccacggatctcgatgctgaccgagggaagttgcccggcaagaagctgccgctggaggtgctcaaagagatggaagccaatgcccggaaagctggctgcaccaggggctgtctgatctgcctgtcccacatcaagtgcacgcccaagatgaagaagtggctcccaggacgctgccacacctacgaaggcgacaaagagtccgcacagggcggcataggcgaggcgatcgtcgatattcctgagattcctgggttcaaggacttggagccaatggagcagttcatcgcacaggtcgatctgtgtgtggactgcacaactggctgcctcaaagggcttgccaacgtgcagtgttctgacctgctcaagaagtggctgccgcaacgctgtgcgacctttgccagcaagatccagggccaggtggacaagatcaagggggccggtggtgactaa

SEQ ID NO: 651 - protein, 185 aa, Gaussia princeps
MGVKVLFALICIAVAEAKPTENNEDFNIVAVASNFATTDLDADRGKLPGKKLPLEVLKEMEANARKAGCTRGCLICLSHIKCTPKMKKWLPGRCHTYEGDKESAQGGIGEAIVDIPEIPGFKDLEPMEQFIAQVDLCVDCTTGCLKGLANVQCSDLLKKWLPQRCATFASKIQGQVDKIKGAGGD

SEQ ID NO: 652 - DNA, 657 bp, Hepatitis A virus
  CDS (1)..(657)
  misc_feature (1)..(657): Hepatitis A 3C(G17P)
tcaactttggaaatagcaggactggttaggaagaacttggttcagtttccngttggagagaagaatggatgtgtgagatgggttatgaatgccttgggagtgaaagatgattggctgcttgtgccttcccatgcttataaatttgagaaagattatgaaatgatggagttttattttaatagaggtggaacttactattcaatttcagctggtaatgttgttattcaatctttggatgtgggattccaggatgttgttctgatgaaggttcctacaattcctaagtttagagatattactcagcattttattaagaaaggggatgtgcctagagctttgaatcgcctggcaacattagtgacaactgtaaatggaacccctatgttaatttctgagggcccactaaagatggaagagaaagctacttatgttcataagaaaaatgatggtacaacagttgatttaactgtggatcaggcatggagaggaaaaggcgaaggtcttcctggaatgtgtggtggggccttggtttcatcgaatcaatctatacagaatgcaatcttgggcatccatgttgctggaggaaattcaattcttgttgcaaaattggttactcaagaaatgttccaaaatattgataagaaaattgaaagtcag

SEQ ID NO: 653 - protein, 219 aa, Hepatitis A virus
STLEIAGLVRKNLVQFPVGEKNGCVRWVMNALGVKDDWLLVPSHAYKFEKDYEMMEFYFNRGGTYYSISAGNVVIQSLDVGFQDVVLMKVPTIPKFRDITQHFIKKGDVPRALNRLATLVTTVNGTPMLISEGPLKMEEKATYVHKKNDGTTVDLTVDQAWRGKGEGLPGMCGGALVSSNQSIQNAILGIHVAGGNSILVAKLVTQEMFQNIDKKIESQ

SEQ ID NO: 654 - DNA, 657 bp, Hepatitis A virus
  CDS (1)..(657)
  misc_feature (1)..(657): Hepatitis A 3C(V18P)
tcaactttggaaatagcaggactggttaggaagaacttggttcagtttggaccnggagagaagaatggatgtgtgagatgggttatgaatgccttgggagtgaaagatgattggctgcttgtgccttcccatgcttataaatttgagaaagattatgaaatgatggagttttattttaatagaggtggaacttactattcaatttcagctggtaatgttgttattcaatctttggatgtgggattccaggatgttgttctgatgaaggttcctacaattcctaagtttagagatattactcagcattttattaagaaaggggatgtgcctagagctttgaatcgcctggcaacattagtgacaactgtaaatggaacccctatgttaatttctgagggcccactaaagatggaagagaaagctacttatgttcataagaaaaatgatggtacaacagttgatttaactgtggatcaggcatggagaggaaaaggcgaaggtcttcctggaatgtgtggtggggccttggtttcatcgaatcaatctatacagaatgcaatcttgggcatccatgttgctggaggaaattcaattcttgttgcaaaattggttactcaagaaatgttccaaaatattgataagaaaattgaaagtcag

SEQ ID NO: 655 - protein, 219 aa, Hepatitis A virus
STLEIAGLVRKNLVQFGPGEKNGCVRWVMNALGVKDDWLLVPSHAYKFEKDYEMMEFYFNRGGTYYSISAGNVVIQSLDVGFQDVVLMKVPTIPKFRDITQHFIKKGDVPRALNRLATLVTTVNGTPMLISEGPLKMEEKATYVHKKNDGTTVDLTVDQAWRGKGEGLPGMCGGALVSSNQSIQNAILGIHVAGGNSILVAKLVTQEMFQNIDKKIESQ
